(19) United States
(12) Patent Application Publication
(10) Pub. No.: US 2023/0172999 A1
(43) Pub. Date: Jun. 8, 2023

(54) MICROBIAL COMPOSITIONS, STRAINS AND METHODS

(71) Applicant: University College Cork - National University of Ireland, Cork, Cork (IE)

(72) Inventors: Paul O’Toole, Cork (IE); Ian Jeffery, Cork (IE); Tarini Ghosh, Cork (IE); Huizi Tan, Cork (IE); Marta Perez, Cork (IE); Alexandra Ntemiri, Cork (IE)

(21) Appl. No.: 17/769,596

(22) PCT Filed: Oct. 16, 2020
(86) PCT No.: PCT/EP2020/079283

§ 371 Date: Apr. 15, 2022

(30) Foreign Application Priority Data
Oct. 17, 2019 (EP) 19203965.9

(51) Int. Cl. A61K 35/741

(52) U.S. Cl. CPC A61K 35/741

(57) ABSTRACT

A probiotic composition is provided comprising at least two isolated bacterial species or comprising a purified bacterial preparation comprising at least two bacterial species, wherein the at least two bacterial species are selected from the group consisting of Coprococcus catus, Eubacterium rectale, Alistipes putredinis, Barnesiella intestinihominis, Roseburia hominis, Dorea longicatena and Faecalibacterium prausnitzii. Also provided are specific isolated bacterial strains and use of the composition for treating frailty and/or inflammation related to aging in elderly subjects.

### FIELD OF THE INVENTION

[0001] The present invention relates to methods of delaying or treating frailty, methods of delaying or treating inflammation associated with ageing, and microbial compositions and strains which may be used in such methods. The invention also relates to methods of preparing a modified artificial bacterial consortium for use in such methods.

### BACKGROUND OF THE INVENTION

[0002] Alterations in the gut microbiome have been reported for many diseases. Identifying the specificity of these alterations is necessary for developing microbiome-based diagnostic and therapeutic strategies. Meta-analyses across cases and controls from different locations have identified microbiome alterations common to multiple diseases, as well as disease-specific alterations. While certain diseases like colorectal cancer (CRC) are characterised by an increase (or gain) of pathobionts (such as Fusobacterium, Porphyromonas, Parvimonas), the onset of others like Inflammatory Bowel Disease (IBD) is associated with the depletion of specific taxa (e.g. Roseburia, Faecalibacterium). In contrast, diarrhoeal diseases are accompanied by both an increase of pathobionts (specifically Enterobacteriaceae) as well as lower abundance of commensal taxa. While species like Faecalibacterium prausnitzii and Roseburia have been shown to be reduced in inflammatory and metabolic disorders like Type 2 diabetes, Barnesiella intestinihominis has been indicated to prevent onset of colorectal cancer and Clostridium difficile infections (two disorders that are predominant in the elderly). Similarly, species belonging to Coprococcus genus have been indicated to be associated with reduced depression.

[0003] Frailty refers to a generic failure of multiple systems. Tools for measuring frailty include the Functional Independence Measure (FIM) and the Barthel Index. It has been shown that frail elderly subjects have a microbiota profile characterised by low diversity compared to healthy elderly subjects. In particular, a microbiota profile characterised by low diversity is associated with subjects that live in long-term residential care and who consume a diet low in fibre and enriched in saturated fat. Reducing the prevalence or severity of frailty in the elderly would be beneficial for decreasing the risk of serious injury or illness in elderly subjects, for example as a result of a fall or otherwise. Treatments to date include exercise and nutritional interventions.

[0004] Ageing has been associated with specific changes in the gut microbiome, which include a loss of specific bacterial species. This could be a consequence of specific dietary changes, intake of medications and an overall decline of immune status with age and is likely to drive the ageing gut microbiome to an increasingly disease susceptible state. Ageing-associated microbiome alterations have been identified in the ELDERMET cohort, reinforced by lower complexity dietary intake and poly-pharmacy (Borrel G., et al. Genomics and metagenomics of trimethylamine-utilizing Archaea in the human gut microbiome. ISME J. 2017 Sep; 11(9): 2059-2074). Human aging is characterised by a chronic, low-grade inflammation and this phenomenon has been termed “inflammaging”. Inflammaging is a highly significant risk factor for mortality in the elderly.

[0005] Interventions targeting the gut microbiota, such as the use of live biotherapeutic consortia, provide a promising approach to treat diseases and conditions associated with gut microbiota alterations. Faecal microbiota transplantation (FMT) has been shown to be highly effective for curing Clostridium difficile-associated diarrhoea (CDAD), but requires extensive screening of donors to eliminate the chance of administering infectious agents. Furthermore, the biological impact of transplanting an at-risk patient with an essentially uncharacterised inoculum is unknown, especially in relation to long-term effects. It has been shown that a relatively simple cocktail of 33 cultured and lab-purified isolates is effective against CDAD. Methods to maintain or restore gut integrity and/or a youthful microbiota are also considered to hold promise for reducing age-related inflammation (Franceschi and Campisis, Chronic Inflammation (Inflammaging) and Its Potential Contribution to Age-Associated Diseases. J. Gerontol. A. Biol. Sci. Med. Sci. 2014, June; 69(S1):S4-S9).

[0006] Microbiome reconstruction strategies can occur through diverse approaches, but the two simplest and most direct types are diet-based and microbe-based. Dietary formulations, while demonstrating reasonably high efficiency in infants/children, have been shown to be inefficient and in older subjects, with success subject to patient compliance. Microbe-based strategies include faecal microbiome transplantation and live biotherapeutics. Currently available probiotic supplements are mostly based on Lactobacillus, or Bifidobacterium species. Although these supplements may have high efficacy for the infant, children and young adult populations, the associations of these species with health have not been convincingly demonstrated for the elderly. Elderly people experience distinct changes in physiology and dietary patterns, accompanied by characteristics that are distinct from those in the younger populations. Appropriate microbiome-based therapeutic strategies that facilitate the retention of a health-associated gut microbiome in the elderly and prevent or delay the onset of frailty and age-related inflammation would therefore be of benefit. In particular, the provision of a therapeutic microbiome restoration consortium for use in the elderly population containing a rationally selected set of microbial species whose loss in the elderly is associated with frailty onset and age-related inflammation may be advantageous in delaying or reducing frailty and age-related inflammation in the elderly.

### SUMMARY OF THE INVENTION

[0007] The present inventors have identified six bacterial species which have positive effects in the prevention of frailty and/or the treatment of inflammation associated with ageing.

[0008] According to a first aspect of the present invention, there is provided a composition for use in treating or delaying onset of frailty in a subject in need thereof, wherein said composition comprises one or more bacterial species selected from the group consisting of Coprococcuscatus, Eubacteriumrectale, Alistipesputredinis, Barnesiellaintestinihominis, Roseburiahominis, and Dorealongicatena, wherein said one or more bacterial species are isolated bacterial species or are comprised within a purified bacterial preparation comprising said bacterial species The composition or the purified bacterial preparation may comprise at least two of the one or more bacterial species.

[0009] According to a second aspect, there is provided a composition for use in treating or delaying onset of inflammation related to aging in a subject in need thereof, wherein said composition comprises one or more bacterial species selected from the group consisting of Coprococcus catus, Eubacteriumrectale, Alistipesputredinis, Barnesiellaintestinihominis, Roseburia hominis, and Dorea longicatena, wherein said one or more bacterial species are isolated bacterial species or are comprised within a purified bacterial preparation comprising said bacterial species.

[0010] A third aspect of the invention provides a method of treating or delaying onset of frailty in a subject in need thereof, wherein said method comprises one or more bacterial species selected from the group consisting of Coprococcus catus, Eubacterium rectale, Alistipes putredinis, Barnesiella intestinihominis, Roseburia hominis, and Dorea longicatena, wherein said one or more bacterial species are isolated bacterial species or are comprised within a purified bacterial preparation comprising said bacterial species.

[0011] A fourth aspect of the invention provides a method of treating or delaying onset of inflammation related to aging in a subject in need thereof, wherein said method comprises one or more bacterial species selected from the group consisting of Coprococcus catus, Eubacterium rectale, Alistipes putredinis, Barnesiella intestinihominis, Roseburia hominis, and Dorea longicatena, wherein said bacterial species are isolated bacterial species or are comprised within a purified bacterial preparation comprising said bacterial species.

[0012] A fifth aspect of the invention provides the use of a composition comprising one or more isolated bacterial species or comprising a purified bacterial preparation comprising one or more bacterial species in the preparation of a medicament for treating or delaying onset of frailty in a subject in need thereof, wherein the one or more bacterial species are selected from the group consisting of Coprococcus catus, Eubacterium rectale, Alistipes putredinis, Barnesiella intestinihominis, Roseburia hominis, and Dorea longicatena.

[0013] A sixth aspect of the invention provides the use of a composition comprising one or more isolated bacterial species or comprising a purified bacterial preparation comprising one or more bacterial species in the preparation of a medicament for treating or delaying onset of inflammation related to aging (inflammaging) in a subject in need thereof, wherein the one or more bacterial species are selected from the group consisting of Coprococcus catus, Eubacterium rectale, Alistipes putredinis, Barnesiella intestinihominis, Roseburia hominis, and Dorea longicatena.

[0014] The composition of or for use in the invention may comprise two or more of the bacterial species. As described in the Examples, the inventors have shown synergism in the effect of these species when used together

[0015] In certain embodiments of the invention, the composition comprises one or more of the following pairs of bacterial species: Coprococcus catus and Eubacterium rectale, Coprococcus catus and Alistipes putredinis, Barnesiella intestinihominis and Eubacterium rectale, Roseburia hominis and Dorea longicatena, Dorea longicatena and Eubacterium rectale.

[0016] In certain embodiments of the invention, the composition comprises Coprococcus catus and Eubacterium rectale.

[0017] In certain embodiments of the invention, the composition comprises Coprococcus catus and Dorea longicatena.

[0018] In certain embodiments of the invention, the composition comprises Coprococcus catus and Roseburia hominis.

[0019] In certain embodiments of the invention, the composition comprises Coprococcus catus and Barnesiella intestinihominis.

[0020] In certain embodiments of the invention, the composition comprises Coprococcus catus and Alistipes putredinis..

[0021] In certain embodiments of the invention, the composition comprises Eubacterium rectale and Dorea longicatena.

[0022] In certain embodiments of the invention, the composition comprises Eubacterium rectale and Roseburia hominis.

[0023] In certain embodiments of the invention, the composition comprises Eubacterium rectale and Barnesiella intestinihominis.

[0024] In certain embodiments of the invention, the composition comprises Eubacterium rectale and Alistipes putredinis.

[0025] In certain embodiments of the invention, the composition comprises Dorea longicatena and Roseburia hominis.

[0026] In certain embodiments of the invention, the composition comprises Dorea longicatena and Barnesiella intestinihominis.

[0027] In certain embodiments of the invention, the composition comprises Dorea longicatena and Alistipes putredinis.

[0028] In certain embodiments of the invention, the composition comprises Roseburia hominis and Barnesiella intestinihominis.

[0029] In certain embodiments of the invention, the composition comprises Roseburia hominis and Alistipes putredinis.

[0030] In certain embodiments of the invention, the composition comprises at least three, at least four, or at least five of said bacterial species.

[0031] In a particular embodiment, the composition comprises Coprococcus catus, Eubacterium rectale, Alistipes putredinis, Barnesiella intestinihominis, Roseburia hominis, and Dorea longicatena.

[0032] In certain embodiments, the composition may additionally comprise Faecalibacterium prausnitzii as an isolated bacterial species or comprised within a purified bacterial preparation.

[0033] In certain embodiments of the invention, the composition comprises Faecalibacterium prausnitzii and Coprococcus catus,
[0034] In certain embodiments of the invention, the composition comprises Faecalibacterium prausnitzii and Eubacterium rectale,
[0035] In certain embodiments of the invention, the composition comprises Faecalibacterium prausnitzii and Dorea longicatena,
[0036] In certain embodiments of the invention, the composition comprises Faecalibacterium prausnitzii and Roseburia hominis,
[0037] In certain embodiments of the invention, the composition comprises Faecalibacterium prausnitzii and Barnesiella intestinihominis, ,
[0038] In certain embodiments of the invention, the composition comprises Faecalibacterium prausnitzii and Alistipes putredinis,

[0039] As demonstrated in the Examples, certain bacterial species have a negative effect on frailty and thus should be avoided in the treatment of elderly people. Indeed certain bacterial species have such negative effects despite having a positive effect in the treatment of, for example, inflammatory bowel disease in younger patients.

[0040] Accordingly, in certain embodiments of the invention, the composition does not comprise Collinsella aerofaciens. In certain embodiments of the invention, the composition additionally or alternatively comprises none of Ruminoccus torques, Clostridium ramosum, Coprococcus comes, Flavonifractor plautii, or Streptococcus anginosus. In other embodiments, the composition comprises none of Clostridium asparagiforme, Clostridium scindens, Clostridium leptum, and Bacteroides fragilis.

[0041] According to a seventh aspect of the invention, there is provided a pharmaceutical or probiotic composition comprising at least two bacterial species selected from the group consisting of Coprococcus catus, Eubacterium rectale, Alistipes putredinis, Barnesiella intestinihominis, Roseburia hominis, Dorea longicatena and Faecalibacterium prausnitzii, wherein said bacterial species are isolated bacterial species or are comprised within a purified bacterial preparation comprising said bacterial species, wherein said composition comprises none of Collinsella aerofaciens, Ruminoccus torques, Clostridium ramosum, Coprococcus comes, Flavonifractor plautii, or Streptococcus anginosus.

[0042] The composition allows for the maintenance or restoration of a healthy microbiota in the gastrointestinal tract of a mammalian subject. The composition may be used for microbiome reconstruction or remediation. In particular, the composition may be used as therapeutic agents in conditions where dysbiosis (deviation from typical microbiome composition associated with health) is implicated, such as frailty and inflammation associated with ageing. The composition may restore a health-associated mammalian bacterial intestinal microbiota. In particular, the composition may increase the diversity and/or richness of a subject’s microbiota profile and reduce the risk of adverse health effects, for example, frailty and inflammation associated with ageing. The composition may restore specific bacterial species and beneficial metabolic processes which have been lost from the microbiome due to ageing. The required species may be identified by comparing the subject’s faecal microbiota with that of one or more healthy subjects. In particular, the composition allows the rectification of the gut microbiota of frail elderly subjects, for example, using live biotherapeutic units having a defined microbial configuration. This avoids any risk associated with the use of an uncharacterised inoculum.

[0043] In one embodiment of the seventh aspect of the invention, the composition comprises none of Clostridium asparagiforme, Clostridium scindens, Clostridium leptum, and Bacteroides fragilis.

[0044] In certain embodiments of the invention, the composition of or for use in the invention comprises Coprococcus catus, Eubacterium rectale, Alistipes putredinis, Barnesiella intestinihominis, Roseburia hominis, Dorea longicatena, and Faecalibacterium prausnitzii in the absence of any other bacterial species. In certain other embodiments of the invention, the bacteria in the composition of or for use in the invention consist essentially of or consist of Coprococcus catus, Eubacterium rectale, Alistipes putredinis, Barnesiella intestinihominis, Roseburia hominis, Dorea longicatena, and Faecalibacterium prausnitzii.

[0045] In certain embodiments of the above aspects, the bacteria in the composition of or for use in the invention comprise, consist essentially of or consist of two or more, three or more, four or more, five or more, six or more, or all six species selected from the group consisting of Coprococcus catus, Eubacterium rectale, Alistipes putredinis, Barnesiella intestinihominis, Roseburia hominis, and Dorea longicatena. In certain embodiments of the above aspects, the bacteria in the composition comprise, consist essentially of or consist of at least two, at least three, at least four, at least five, at least six or all seven species selected from the group consisting of Coprococcus catus, Eubacterium rectale, Alistipes putredinis, Barnesiella intestinihominis, Roseburia hominis, Dorea longicatena and Faecalibacterium prausnitzii. In certain embodiments of the above aspects, the bacteria in the composition comprise, consist essentially of or consist of two, three, four, five, six or all seven species selected from the group consisting of Coprococcus catus, Eubacterium rectale, Alistipes putredinis, Barnesiella intestinihominis, Roseburia hominis, Dorea longicatena and Faecalibacterium prausnitzii.

[0046] In certain embodiments of the above aspects, one or more bacterial species comprise strains selected from the group consisting of Coprococcus catus (MCC394) deposited under NCIMB 43487, Eubacterium rectale (MCC552) deposited under NCIMB 43489, Alistipes putredinis (MCC001) deposited under NCIMB 43485, Barnesiella intestinihominis (MCC256) deposited under NCIMB 43486, Roseburia hominis (MCC694) deposited under NCIMB 43491, Dorea longicatena (MCC451) deposited under NCIMB 43488 and Faecalibacterium prausnitzii (MCC585) deposited under NCIMB 43490.

[0047] In certain embodiments of the above aspects, where present, the Coprococcus catus strain comprises SEQ ID No. 1, the Eubacterium rectale strain comprises SEQ ID No. 2, the Alistipes putredinis strain comprises SEQ ID No. 3, the Barnesiella intestinihominis strain comprises SEQ ID No. 4, the Roseburia hominis strain comprises SEQ ID No. 5, the Dorea longicatena strain comprises SEQ ID No. 6 and/or the Faecalibacterium prausnitzii strain comprises SEQ ID No. 7.

[0048] In certain embodiments of the above aspects, the bacteria of the composition comprise, consist essentially of or consist of the genera shown in Table 3 (the Microbiome Culture Collection 100 (MCC100)). In certain embodiments of the above aspects, one or more bacterial species comprises one or more strains of a single species of bacteria, e.g. one or more strains of Coprococcus catus, Eubacterium rectale, Alistipes putredinis, Barnesiella intestinihominis, Roseburia hominis, Dorea longicatena and/or Faecalibacterium prausnitzii.

[0049] The isolated strains of the bacterial species for use in the invention may be provided as a live biotherapeutic. As such, the invention extends to a live biotherapeutic comprising the composition of the invention.

[0050] According to an eighth aspect of the present invention, there is provided a method of preparing a modified artificial bacterial consortium for use in treating frailty, the method comprising:
[0051] comparing normal faecal microbiota of healthy subjects with faecal microbiota of a subject to be treated to identify alterations in the proportional abundance of one or more bacterial species selected from the group consisting of Coprococcus catus, Eubacterium rectale, Alistipes putredinis, Barnesiella intestinihominis, Roseburia hominis, and Dorea longicatena in the microbiota of the subject with the condition; and
[0052] adjusting the composition and proportional abundance of said one or more bacterial species in an original artificial bacterial consortium to provide a modified artificial bacterial consortium that rectifies the identified alterations.

[0053] In one such embodiment, the method comprises identifying alterations in the proportional abundance of two or more, three, or more, four or more, or five or more or all six of said bacterial species.

[0054] In one embodiment, the method comprises identifying the presence or absence of alterations in the proportional abundance of each of Coprococcus catus, Eubacterium rectale, Alistipes putredinis, Barnesiella intestinihominis, Roseburia hominis, and Dorea longicatena in the microbiota of the subject with the condition; and
[0055] adjusting the composition and proportional abundance of said bacterial species where alterations have been identified

[0056] In one such embodiment the method comprises identifying the presence or absence of alterations in the proportional abundance of each of Coprococcus catus, Eubacterium rectale, Alistipes putredinis, Barnesiella intestinihominis, Roseburia hominis, Dorea longicatena and Faecalibacterium prausnitzii in the microbiota of the subject with the condition; and
[0057] adjusting the composition and proportional abundance of said bacterial species where alterations have been identified.

[0058] It is appreciated that certain features of the invention, which are, for clarity, described in the context of separate embodiments, may also be provided in combination in a single embodiment. Conversely, various features of the invention which are, for brevity, described in the context of a single embodiment, may also be provided separately or in any suitable sub-combination.

### BRIEF DESCRIPTION OF THE FIGURES

[0059] The invention will be more clearly understood from the following description of some embodiments thereof, given by way of example only, with reference to the following figures in which:

[0060] FIG. 1. Age influences microbiome composition as well as microbiome-disease signatures. A. Bar plots showing the effect (denoted by R² values computed using PERMANOVA) of host factors with microbiome composition in the ExperimentHub repository. Only metadata available for at least 30% of the samples are shown. The p-values for the significance of association are also indicated as ****: P < 0.0001; ***: P < 0.001, **: P < 0.01, *: P < 0.05. B. Principal Co-ordinate Analysis (PCoA) plots of the species profiles of the control samples grouped into three age ranges, Young (20-40 years), Middle (40-60 years) and Elderly (60-80 years). The significance (p-value) of the differences between the three groups, computed using PERMANOVA (adonis) after considering the country-specific differences, is also indicated. The boxplots on the top show the variation of the top three PCoA coordinates for the samples belonging to the three age-groups. The elderly harboured a significantly different microbiome compared to the young/middle-aged.

[0061] FIG. 2. Disease specific continent-cohorts ensured geographical homogeneity across comparisons. The continent specific cohorts within which the analysis was restricted for each disease, to take into account the regional variations.

[0062] FIG. 3. Age-related microbiome changes affect taxon abundance alterations for specific diseases, as well as the microbiome response shared by multiple diseases A. Comparison of the relative proportions of more abundant and less abundant disease-specific marker taxa across the young, middle-aged and elderly age-groups for the five diseases. For each disease-age-group scenario, the inventors checked for the directionality (increased abundance in disease v/s decreased in disease) of association of the corresponding top disease-predictors by comparing their abundance trends in the control and diseased samples belonging to the specific age-groups (See Methods). To ensure that the results thus obtained were not affected by regional variations in microbiome composition, the inventors again restricted these comparisons to the disease-specific continent cohorts. B. Comparison of the disease prediction AUCs, the disease classification sensitivity and control classification specificity of generic disease prediction models obtained for the elderly and young/middle-aged groups. Overall, the generic disease classifiers had a significant decrease in performance in the elderly age groups, indicating that shared microbiome response may be reduced in the elderly. Moreover, the loss of performance was especially significant with respect to the discrimination of control samples from disease. C and D. Heatmap of marker species showing consistent trends of either increase (C) or decrease (D) in at least two diseases in the elderly and young/middle-aged groups. The darker shading indicates consistent increase (C) in two or more diseases, the lighter shading indicates decrease (D) in two or more diseases. Based on their patterns of increase or decrease across the two age-groups, the taxa could be classified into six groups, namely G1-G3 and L1-L3.

[0063] FIG. 4. Identification of the seven strains for the probiotic consortium based on their reproducible association with reduced frailty and their loss in multiple diseases. A. Availability of the strains in the MCC100. B. The heatmap shows the ranked median abundance of some of the top frailty-predictive taxa (identified in the ELDERMET cohort) showing significant differential abundance across the three groups. Six of these taxa (highlighted in boxes) are observed to be decreased in multiple diseases (based on the meta-analysis in the curatedMetagenomicData). Faecalibacterium prausnitzii, although not detected in the curatedMetagenomicData meta-analysis has been associated with reduced frailty in the Twins-UK cohort.

[0064] FIG. 5 shows antimicrobial susceptibility of the MCC100 bacterial strains. The number of susceptible (bottom for all), intermediate resistant (second from bottom for Benzylpenicillin and top for Imipenem), resistant (top for Benzylpenicillin, Chloramphenicol, Clindamycin and Vancomycin) and naturally resistant (second from top for Benzylpenicillin, Clindamycin and Vancomycin and top for Metromidazole) strains is indicated for each antibiotic tested. Intrinsic resistance to Vancomycin was assumed for the non-tested strains for graphical representation.

[0065] FIG. 6 shows alpha-diversity indexes obtained from samples at the end of the fermentation run. Wilcoxon test performed for statistical analysis.

[0066] FIG. 7A shows a comparison of the co-occurrence networks obtained for seven species computed for the gut microbiomes of the Elderly individuals of the ELDERMET cohort and that obtained computed for the younger Irish individuals. For the Elderly, bold edges are drawn between two species if significant Spearman positive correlation FDR < 0.1 are observed between the two. For the younger individuals, the same is shown using dotted edges.

[0067] FIG. 7B shows Spearman correlations of FIM, Barthel Score, CRP levels and MMSE scores obtained individually for the seven species, as well as with the cumulated abundance of all the seven, taken together.

[0068] FIG. 8A illustrates the co-occurrence network observed between the 82 OTUs derived from the 7 taxa shown in FIG. 7A, with the OTUs belonging to the different species in different shapes.

[0069] FIG. 8B illustrates barplots showing the comparison of the ratios of the number of Positive and Negative interactions observed within this subset of 82 OTUs with those observed overall across all other OTUs in the NU-AGE cohort. The Fishers’ exact test P-value indicating the significant enrichment of positive interactions within this 82 OTU subset is also presented.

### DETAILED DESCRIPTION OF THE INVENTION

### Definitions

[0070] Unless otherwise defined, all technical and scientific terms used herein have the meaning commonly understood by a person who is skilled in the art in the field of the present invention.

[0071] The term “frailty” is used herein to describe a state of vulnerability to poor resolution of homeostasis following a stress and is a consequence of cumulative decline in multiple physiological systems over a lifespan. Specifically, it refers to a condition characterised by an individual having 3 or more of 5 phenotypic criteria: unintentional weight loss, low grip strength, low energy, slowed walking speed, and low level of physical activity.

[0072] “Faecal microbiota” as used herein is considered a to represent a non-invasive proxy for intestinal microbiota.

[0073] Typically, the terms “subject” and “patient” are used interchangeably herein. The subject is typically a mammal, more typically a human.

[0074] The term “treatment” as used herein and associated terms such as “treat” and “treating” means the reduction or inhibition of the progression, severity and/or onset of frailty or inflammation related to ageing (inflammaging), or at least one symptom thereof. The term “treatment” therefore refers to any regimen that can benefit a subject. Treatment may include curative, alleviative or prophylactic effects. In certain embodiments, the onset of frailty or inflammation related to aging is delayed.

[0075] A peptide, polypeptide, protein, bacteria or nucleic acid molecule of the invention may be provided in an “isolated” form. The term “isolated” as used herein means that the substance is provided in a form that differs from its naturally occurring environment. It may be used to refer to an in vitro preparation, isolation and/or purification of a peptide, polypeptide, protein, bacteria or nucleic acid molecule of the invention, such that it is not associated with in vivo substances or is substantially purified from in vivo substances or is present outside its naturally occurring environment.

[0076] In certain embodiments, the one or more bacterial species or strain is an isolated bacterial species or strain. An “isolated” bacteria is one which has been identified and separated and/or recovered from a component of its natural environment.

[0077] As used herein, a polypeptide can be considered to be “derived from” a strain if the polypeptide originates directly or indirectly from the strain. The polypeptide may be encoded by a part of the genome of the strain and may therefore be obtainable directly from culturing the strain, including for example being expressed in the strain, for example in microbial whole cells, being present in the cytosol thereof, being present in a cell culture thereof or being present in a cell lysate thereof. The polypeptide may also be synthetically prepared from a gene which is endogenous to the strain of the invention following isolation of the gene from the strain and sequencing of the gene. For example, the polypeptide may be synthetically prepared, and/or be obtained using recombinant DNA technology, such as from a genetically engineered plasmid/host cell system in which the plasmid includes a nucleic acid polymer which encodes the polypeptide.

[0078] As used herein the terms “nucleic acid” or “nucleotide sequence” includes genomic DNA, cDNA or RNA.

[0079] The phrase “consist(s) essentially of” or “consisting essentially of” as used herein means that a composition may have additional components beyond those described provided that such additional components do not materially affect the desired function of the composition. For example, a composition consisting essentially of seven specified bacterial species may contain one, two or three additional, species, provided that these additional species do not interfere with its function. For example, where the compostion is for the treatment or prevention of frailty of age related inflammation, the additional species have neither a positive nor a negative effect on frailty or age-related inflammation or are present a concentration too low to have an effect.

[0080] The terms “polypeptide”, “peptide”, or “protein” are used interchangeably herein to designate a linear series of amino acid residues connected one to the other by peptide bonds between the alpha-amino and carboxy groups of adjacent residues. The amino acid residues are usually in the natural “L” isomeric form. However, residues in the “D” isomeric form can be substituted for any L-amino acid residue, as long as the desired functional property is retained by the polypeptide.

[0081] A peptide, polypeptide, protein, bacteria or nucleic acid molecule of the invention may be provided in a “purified” form. A nucleic acid or polypeptide of the presently disclosed subject matter is purified if it is substantially free of cellular material, viral material, or culture medium when produced by recombinant DNA techniques, or chemical precursors or other chemicals when chemically synthesised.

[0082] The words “comprises/comprising” and the words “having/including” when used herein with reference to the present invention are used to specify the presence of stated features, integers, steps or components, but do not preclude the presence or addition of one or more other features, integers, steps, components or groups thereof.

[0083] As used herein, terms such as “a”, “an” and “the” include singular and plural referents unless the context clearly demands otherwise.

### Frailty

[0084] Frail older people have a gut microbiota composition characterised by an increase in Bacteroidetes and low alpha diversity compared to healthy older individuals. The present inventors have identified a set of bacterial taxa in the gut microbiome whose abundance corresponds inversely with microbiome disease response and frailty in older people and have defined a stable artificial microbiota consortium using an in vitro fermentation system to ultimately allow the rectification of the gut microbiota of frail elderly subjects using live biotherapeutic units with a defined microbial configuration. A bacterial consortium mimicking the healthy human gut microbiota may thus be provided to rectify changes in gut microbiota composition linked to increased frailty in older people.

[0085] Frailty has been defined by Fried and colleagues (J Gerontol A Biol Sci Med Sci 2001; 56:M146-156) as a condition characterised by an individual having 3 or more of 5 phenotypic criteria: unintentional weight loss, low grip strength, low energy, slowed walking speed, and low level of physical activity. Where an individual has 1 or 2 of these criteria, the individual is considered to be at high risk of progressing to frailty and may be classified as pre-frail. Various adaptations of the clinical phenotype described by Fried have been proposed.

[0086] For the purposes of the present invention, any suitable scale utilised in the art for assessing frailty by means of the presence of 3 or more of these 5 phenotypic characteristics may be used to characterise frailty in a patient..

[0087] For example, in one embodiment, the criteria for assessing frailty may be those defined by the Cardiovascular Health Study and used by Fried et al (J Gerontol A Biol Sci Med Sci 2001; 56:M146-156).

[0088] These are summarised below in Table 1:

TABLE 1

Frailty Criteria (Cardiovascular Health Study)

| | |
|---|---|
| Weight loss | Baseline: lost >4.5 kg unintentionally in the last year |
| | Follow-up: ([weight in previous year - current weight]/[weight in previous vear])≥0.05 and the loss was unintentional |
| Grip Strength | Women |
| | ≤17 kg for BMI≤23 |
| | ≤17.3 kg for BMI 23.1-26 |
| | ≤18 kg for BMI 26.1-29 |
| | ≤21 kg for BMI>29 |
| | Men |
| | ≤29 kg for BMI≤24 |
| | ≤30 kg for BMI 24.1-26 |
| | ≤30 kg for BMI 26.1-28 |
| | ≤32 kg for BMI>28 |
| Low Energy | Self-report of either |
| | Feeling that everything the person did was an effort in the last week |
| | Inability to get going in the last week |
| Slowness | Observed when walking 4.57 m at usual pace Women |
| | Time≥7 s for height≤159 cm |
| | Time≥6 s for height>159 cm |
| | Men |
| | Time≥7 s for height≤ 173 cm |
| | Time≥6 s for height>173 cm |
| Low physical activity | Women: energy<270 kcal on activity scale (18 items) |
| | Men: energy<383 kcal on activity scale (18 items) |

BMI: Body mass index; calculated as the weight in kilograms divided by the height in meters squared.

[0089] In another embodiment, the criteria for assessing frailty may be those defined by the Women’s Health and Aging Studies described by Bandeen-Roche et al (J Gerontol A Biol Sci Med Sci. 2006; 61: 262-266) and Xue et al. (J Gerontol A Biol Sci Med Sci. 2008; 63: 984-990).

TABLE 2

Frailty Criteria (Women’s Health and Aging Studies)

| | |
|---|---|
| Weight loss | Baseline: either of the following: |
| | ([weight at age 60 y - weight at examination]/[weight at age 60 years])≥0.1 |
| | BMI at examination< 18.5 |
| | Follow-up: either of the following: |
| | BMI at examination<18.5 |
| | ([weight in previous year - current weight]/[weight in previous year])≥0.05 and the loss was unintentional |
| Grip Strength | Women |
| | ≤17 kg for BMI≤23 |
| | ≤17.3 kg for BMI 23.1-26 |
| | ≤18 kg for BMI 26.1-29 |
| | ≤21 kg for BMI>29 |
| | Men |
| | ≤29 kg for BMI≤24 |
| | ≤30 kg for BMI 24.1-26 |
| | ≤30 kg for BMI 26.1-28 |
| | ≤32 kg for BMI>28 |
| Low Energy | Self-report of any of the following: |
| | Low usual energy level |
| | a |
| | ≤3, range 0-10) |
| | Felt unusually tired in the past month |
| | b |
| Slowness | Observed when walking 4 m at usual pace |
| | Women |
| | Speed≤4.57/7 m/s for height≤159 cm |
| | Speed≤4.57/6 m/s for height>159 cm |
| | Men |
| | Speed≤4.57/7 m/s for height≤173 cm |
| | Speed≤4.57/6 m/s for height>173 cm |
| Low physical activity | Women: energy<90 kcal on activity scale (6 items) Men: energy<128 kcal on activity scale (6 items) |

BMI: Body mass index; calculated as the weight in kilograms divided by the height in meters squared.
a Rated on 0-10 scale, where 0 indicated “no energy” and 10 indicated “the most energy that you have ever had.”
b If yes, there followed the question, “How much of the time?” the feeling persisted; responses “Most” or “All” of the time were considered indicative of exhaustion.

[0090] Another approach to the definition of frailty has been the Rockwood Frailty Index (Rockwood and Mitnitski, 2007, J. Gerontol Med. Sci.; 62: 722-727). Rockwood’s method considers frailty in relation to the accumulation of deficits but is considered more complicated to implement than that of Fried. Other measures employed to assess frailty include the Barthel index, Functional Independence Measure (FIM), and the Mini Mental State Examination (MMSE). In addition, levels of C-reactive protein may be used to assess inflammation status in a subject.

[0091] In another embodiment of the invention, the criteria for assessing frailty may be one of more of the Barthel index, the FIM measure, and the MMSE measure, optionally together with CRP.

[0092] The Barthel index of activities of daily living (ADL) was introduced by Dorothea Barthel in 1955 as a means to assess progress in self-care and ability during in-patient rehabilitation. (Mahoney and Barthel, Maryland State Med. J. 1965; 14: 61-65). The Index is a numerical score for the subject’s ability and independence with respect to the following: bowel control, bladder control, grooming, toileting, feeding, transfer, walking, bathing, stairs, and dressing. Originally, the index was scored in 5-point increments giving a total score of 0-100. Variants of the Barthel ADL index have subsequently been introduced, with Collin et al. (Int. Disabil. Studies, 1988; 10: 61-63) suggesting a modified score in which the index is scored in 1-point increments, giving a total score of 0-20. Using the modified Barthel ADL index proposed by Collin et al., frailty in a subject is associated with a Barthel index score of 8 or less out of 20 (Hubbard et al., Age and Ageing 2009; 38 (1):115-119). Accordingly, in one embodiment of the invention, an elderly subject is considered to be frail if the subject has a Barthel score of 8 or less out of 20 (or 40 or less out of 100).

[0093] Another means by which frailty may be assessed is the functional independence measure (FIM) (Linacre et al., Arch. Phys. Med. Rehabil., 1994; 75: 127-32). The FIM uses 18 performance measures (eating; grooming; bathing; dressing-upper body; dressing-lower body; toileting; bladder management; bowel management; bed, chair or wheelchair mobility; toilet mobility; bath or shower mobility; walking or wheelchair mobility; stair mobility; comprehension; expression; social interaction; problem solving; and memory). Each measure of the index is scored in a range of 1-7 where 1 equals total assist and 7 equals complete independence, giving a total FIM score in the range from 18 (lowest) to 126 (highest) level of independence.

[0094] In one embodiment of the present invention, an elderly subject is considered to be frail where the FIM score is lower than 90.

[0095] Another measure of frailty is the mini-mental state examination (MMSE) measure (Folstein et al., J. Psychiat. Res., 1975, 189-198). This assessment measure is based on 11 questions that assess the cognitive mental status of a subject. The maximum total score is 30. A score of 24 or less is considered to be associated with frailty (Folstein et al., J. Psychiat. Res., 1975, 189-198). Thus in another embodiment of the present invention, a subject is considered to be frail where the MMSE score for that subject is 24 or less.

[0096] C-reactive protein (CRP) levels may be used to assess inflammation in an elderly subject.

[0097] In certain embodiments of the invention, the subject is an elderly subject. In particular, the subject may be 50 years or older, 55 years or older, 60 years or older, 65 years or older, 70 years or older, 75 years or older, 80 years or older, 85 years or older or 90 years or older. In certain embodiments, the subject is 64 years or older. In certain embodiments, the subject is 60 years or older. In certain embodiments, the subject is suffering from, or at risk from suffering from, frailty or age-related inflammation. The subject may have been diagnosed as being deficient in one or more strains that are normally present in the gut of a healthy subject, e.g. one or more strains of the invention. The composition may comprise the one or more strains identified as being decreased in the subject.

### Bacterial Species

[0098] As described herein, the inventors have identified a set of bacterial species, the abundance of each one of which corresponds inversely with microbiome disease response and frailty in older people. The bacterial taxa comprise Coprococcus catus, Eubacterium rectale, Alistipes putredinis, Barnesiella intestinihominis, Roseburia hominis, and Dorea longicatena. One of more of these bacterial species may be used in methods, compositions , or compositions for use in the invention. Optionally the one or more bacterial species may be combined with Faecalibacterium prausnitzii.

[0099] The following strains were deposited with NCIMB Ltd, Ferguson Building, Craibstone Estate, Bucksburn, Aberdeen, AB21 9YA, Scotland, UK by University College Cork - National University of Ireland (University College Cork), Room 447 Food Science Building, University College Cork, T12 K8AF, Cork, Ireland on 19 Sep. 2019 and assigned accession numbers as follows: Eubacterium rectale (MCC552) deposited under NCIMB 43489, Alistipes putredinis (MCC001) deposited under NCIMB 43485, Barnesiella intestinihominis (MCC256) deposited under NCIMB 43486, Roseburia hominis (MCC694) deposited under NCIMB 43491, Dorea longicatena (MCC451) deposited under NCIMB 43488 and Faecalibacterium prausnitzii (MCC585) deposited under NCIMB 43490. Coprococcus catus (MCC394) was deposited with NCIMB Ltd, Ferguson Building, Craibstone Estate, Bucksburn, Aberdeen, AB21 9YA, Scotland, UK by University College Cork - National University of Ireland (University College Cork), Room 447 Food Science Building, University College Cork, T12 K8AF, Cork, Ireland on 3 Oct. 2019 under NCIMB 43487. All strains were grown on YCFA broth.

[0100] It is understood that the bacterial species for use in the present invention are not limited to the deposited strains since other strains of said species may also be used. Moreover, mutants and variants of the strain, for example, cell fusion strains or recombinant bacteria strains, may also be used in the invention. The term “mutant” is understood herein to refer to a microorganism which is derived from the deposited strain by one or more mutations. The mutant should retain the desired activity of the deposited strain or have improved activity over that of the deposited strain. These mutants can be related bacteria isolates that have either arisen spontaneously or under selection conditions designed to isolate the mutants. For example, commercial kits are available that generate random mutations following which all generated mutants can be screened for anti-microbial activity. The term “variant” is understood herein to refer to a microorganism which comprises the activity of the deposited strain. The variant should retain the desired activity of the deposited strain or have improved activity over that of the deposited strain. These variants can be related bacteria isolates that have either arisen spontaneously or under selection conditions designed to isolate the variants. The variants can also be recombinant bacteria which can be constructed using genetic engineering methods which would be well known to those skilled in the art. All generated variants may be easily screened for desired activity in subjects using frailty scores or biomarkers to measure age-related inflammation.

[0101] In certain embodiments of the invention, one or more bacterial species for use in the invention may comprise strains selected from the group consisting of Coprococcuscatus comprising, consisting essentially of or consisting of amino sequence SEQ ID No. 1 or a variant sequence having at least 90% sequence identity thereto, Eubacteriumrectale comprising, consisting essentially of or consisting of amino sequence SEQ ID No. 2 or a variant sequence having at least 90% sequence identity thereto, Alistipesputredinis comprising, consisting essentially of or consisting of amino sequence SEQ ID No. 3 or a variant sequence having at least 90% sequence identity thereto, Barnesiellaintestinihominis comprising, consisting essentially of or consisting of amino sequence SEQ ID No. 4 or a variant sequence having at least 90% sequence identity thereto, Roseburiahominis comprising, consisting essentially of or consisting of amino sequence SEQ ID No. 5 or a variant sequence having at least 90% sequence identity thereto, Dorealongicatena comprising, consisting essentially of or consisting of amino sequence SEQ ID No. 6 or a variant sequence having at least 90% sequence identity thereto and Faecalibacterium prausnitzii comprising, consisting essentially of or consisting of amino sequence SEQ ID No. 7 or a variant sequence having at least 90% sequence identity thereto.

[0102] As used herein, “sequence identity” or “identity” in the context of two nucleotide or polypeptide sequences makes reference to a specified percentage of residues in the two sequences that are identical when aligned for maximum correspondence over a specified comparison window, as measured by sequence comparison algorithms or by visual inspection. Suitably, a specified comparison window is selected from a sequence encoding or representing at least 20, at least 25, at least 30, at least 40, at least 50, at least 75, at least 80, at least 85, at least 90, at least 95, at least 100, at least 105, at least 110, at least 115, at least 120, at least 121, at least 122, at least 123, at least 150, at least 200, at least 250 or most preferably all of the amino acids of a specified polypeptide being aligned. In certain embodiments, the specified comparison window is all of the residues of the sequences. When percentage of sequence identity is used in reference to proteins it will be understood by those of skill in the art that residue positions which are not identical often differ by conservative amino acid substitutions, i.e. wherein amino acids are substituted with amino acids which have similar chemical properties to those amino acids which are replaced. The percent sequence identity may be adjusted upwards to correct for the conservative nature of a substitution.

[0103] In relation to sequences for use in the invention, sequence identity may be determined using a suitable mathematical algorithm. Computer implementations of such mathematical algorithms can be utilised for comparison of sequences to determine sequence identity. Such implementations include, but are not limited to, CLUSTAL in the PC/Gene program (available from Intelligenetics, Mountain View, California), the ALIGN program (Version 2.0) and GAP, BESTFIT, BLAST, FASTA and TFASTA in the Wisconsin Genetics Software Package, Version 8 (available from Genetics Computer Group (GCG), 575 Science Drive, Madison, Wisconsin, USA)). Suitably alignments using these programs may be performed using the default parameters.

[0104] A variant amino acid sequence may have at least 91%, 92/%, 93%, 94%, 95%, 96%, 97%, 98% or 99% sequence identity with the amino acid sequence in question. The variant amino acid sequence may have at least 95% sequence identity with the amino acid sequence in question. The variant amino acid sequence may have at least 97% sequence identity with the amino acid sequence in question. In a particular embodiment, the variant amino acid sequence may have at least 97% sequence identity with the amino acid sequence in question for a query coverage of greater than 90%. The variant amino acid sequence may have at least 99% sequence identity with the amino acid sequence in question. The variant amino acid sequence may differ from the amino acid sequence on which it is based due to the presence of one or more conservative amino acid substitutions. Typically, the variant amino acid sequence differs from the amino acid sequence on which it is based due to the presence of less than 5, 4, 3, 2 or 1 conservative amino acid substitutions. The only differences between the variant amino acid sequence and the amino acid sequence on which it is based may be conservative amino acid substitutions, that is, no non-conservative amino acid residue alterations are present. In certain embodiments, the variant amino acid sequence may include one or more, preferably less than 3 and more preferably less than 2, truncations, substitutions, deletions or insertions.

[0105] Typically, a bacterial strain comprising the variant amino acid sequence as above retains the ability to restore or maintain a healthy mammalian bacterial intestinal microbiota, for example, to treat frailty or age-related inflammation. Typically, the bacterial strain comprising the variant amino acid sequence has the same or improved activity when compared to the bacterial strain comprising the unmodified amino acid sequence, i.e. the changes to the amino acid sequences do not result in any undesirable loss of activity.

[0106] Amino acids may be grouped according to the properties of their side chains, for examples as follows: (1) non-polar: Ala (A), Val (V), Leu (L), lle (l), Pro (P), Phe (F), Trp (W), Met (M); (2) uncharged polar: Gly (G), Ser (S), Thr (T), Cys (C), Tyr (Y), Asn (N), Gln (Q); (3) acidic: Asp (D), Glu (E); and (4) basic: Lys (K), Arg (R), His(H). Alternatively, naturally occurring residues may be divided into groups based on common side-chain properties, for example: (1) hydrophobic: Norleucine, Met, Ala, Val, Leu, lle; (2) neutral hydrophilic: Cys, Ser, Thr, Asn, Gln; (3) acidic: Asp, Glu; (4) basic: His, Lys, Arg; (5) residues that influence chain orientation: Gly, Pro; and (6) aromatic: Trp, Tyr, Phe. Conservative substitutions entail exchanging a member of one of these classes for another member of the same class, that is an amino acid residue with side chains having similar biochemical properties to the amino acid residue being substituted. Preferably when the amino acid sequences of the invention are modified by way of conservative substitution of any of the amino acid residues contained therein, these changes have no effect on the functional activity of the resulting polypeptide when compared to the unmodified polypeptide. The effect (if any) on function of a change in an amino acid residue may be easily assessed by a person skilled in the art, for example, by generating a mutation library, screening for changes in function and sequencing the mutants.

[0107] In certain embodiments of the invention, bacterial strains which may be used in the invention may comprise a Coprococcuscatus strain which comprises a 16S rDNA comprising SEQ ID No. 15, a Eubacteriumrectale strain which comprises a 16S rDNA comprising SEQ ID No. 16, an Alistipesputredinis strain which comprises a 16S rDNA comprising SEQ ID No. 17, a Barnesiellaintestinihominis strain which comprises a 16S rDNA comprising SEQ ID No. 18, a Roseburiahominis strain which comprises a 16S rDNA comprising SEQ ID No. 19, a Dorealongicatena strain which comprises a 16S rDNA comprising SEQ ID No. 20 and/or a Faecalibacterium prausnitzii strain which comprises a 16S rDNA comprising SEQ ID No. 21.

[0108] In certain embodiments, a Coprococcuscatus bacterial strain for use in the invention comprises a 16S rDNA comprising a sequence at least 99.5% identical to SEQ ID NO: 15. In certain embodiments, the Coprococcuscatus bacterial strain comprises a 16S rDNA comprising a sequence at least 99.6, 99.7, 99.8 or 99.9% identical to SEQ ID NO: 15. In certain embodiments, a Eubacteriumrectale bacterial strain for use in the invention comprises a 16S rDNA comprising a sequence at least 99.5% identical to SEQ ID NO: 16. In certain embodiments, the Eubacteriumrectale bacterial strain comprises a 16S rDNA comprising a sequence at least 99.6, 99.7, 99.8 or 99.9% identical to SEQ ID NO: 16. In certain embodiments, a Barnesiellaintestinihominis bacterial strain for use in the invention comprises a 16S rDNA comprising a sequence at least 99% identical to SEQ ID NO: 18. In certain embodiments, the Barnesiellaintestinihominis bacterial strain comprises a 16S rDNA comprising a sequence at least 99.1, 99.2, 99.3, 99.4, 99.5, 99.6, 99.7, 99.8 or 99.9% identical to SEQ ID NO: 18. In certain embodiments, a Faecalibacteriumprausnitzii bacterial strain for use in the invention comprises a 16S rDNA comprising a sequence at least 99.5% identical to SEQ ID NO: 21. In certain embodiments, a Faecalibacteriumprausnitzii bacterial strain for use in the invention comprises a 16S rDNA comprising a sequence at least 99.6, 99.7, 99.8 or 99.9% identical to SEQ ID NO: 21.

[0109] In certain embodiments of the invention, bacterial strains for use in the invention are encoded from isolated nucleic acid molecule selected from the group consisting of SEQ ID No. 8 (Coprococcuscatus), SEQ ID No. 9 (Eubacteriumrectale), SEQ ID No. 10 (Alistipesputredinis), SEQ ID No. 11 (Barnesiellaintestinihominis), SEQ ID No. 12 (Roseburiahominis), SEQ ID No. 13 (Dorealongicatena), and SEQ ID No. 14 (Faecalibacteriumprausnitzii).

### Personalised Microbiome Therapy

[0110] As described above, one aspect of the present invention comprises a method of preparing a modified artificial bacterial consortium for use in treating frailty, the method comprising:
[0111] comparing normal faecal microbiota of healthy subjects with faecal microbiota of a subject to be treated to identify alterations in the proportional abundance of one or more bacterial species selected from the group consisting of Coprococcus catus, Eubacterium rectale, Alistipes putredinis, Barnesiella intestinihominis, Roseburia hominis, and Dorea longicatena in the microbiota of the subject with the condition; and
[0112] adjusting the composition and proportional abundance of said one or more bacterial species in an original artificial bacterial consortium to provide a modified artificial bacterial consortium that rectifies the identified alterations.

[0113] Optionally the method may comprise identifying alterations in the proportional abundance of one or more bacterial species in addition to said recited bacterial species and adjusting the composition and proportional abundance of said one or more additional bacterial species in said original artificial bacterial consortium to provide a modified artificial bacterial consortium that rectifies the identified alterations in the additional bacterial species as well as in said recited bacterial species.

[0114] The method of the present invention provides an infinitely customisable approach and can thus be used for personalised microbiome therapy, whereby a modified artificial bacterial consortium or inoculum designed to alter the microbiota composition of individual subjects can be prepared based on profiling their microbiome composition, for example, in advance of receiving therapy.

[0115] In certain embodiments, the modified artificial bacterial consortium comprises a single strain from the original artificial bacterial consortium. However, generally the modified artificial bacterial consortium comprises more than one, and generally several, strains, for example, two, three, four, five, six, seven, eight, nine, ten, fifteen, twenty, twenty-five, thirty or more strains.

[0116] In certain embodiments, the alterations in the microbiota of the subject with the condition comprises a microbiota deficit. The composition of the bacterial strains in the original artificial bacterial consortium may be adjusted by selecting one or more bacterial strains from the original artificial bacterial consortium. The proportional abundance of the bacterial strains in the original artificial bacterial consortium may be adjusted by increasing the amount of some strains present while decreasing the amount of other strains present to provide the modified artificial bacterial consortium suitable for treating the condition in question.

[0117] The normal faecal microbiota may be derived from one or more samples obtained from one or more healthy subjects, that is, subjects who are not suffering from frailty or a disease. The healthy subjects may be of a similar age as the subject to be treated.

[0118] In certain embodiments of the above aspect, the original artificial bacterial consortium is prepared by a method comprising identifying strains safe for use in the gut by sequencing the strains and testing the strains for antibiotic resistance.

[0119] In certain embodiments of the above aspect, the method includes a step of formulating the modified artificial bacterial consortium for administration to the subject to be treated.

[0120] In certain embodiments of the above aspect, the method includes a step of administering the modified artificial bacterial consortium to the subject to be treated.

[0121] According to a further aspect of the present invention, there is provided a modified artificial bacterial consortium prepared using the method described above.

[0122] The present inventors have developed the Microbiome Culture Collection 100 (MCC100), which is a general collection of putative probiotic microbial species that mimic the healthy gut microbiota composition and that could be used as a menu of single/consortium of next-generation probiotics for various indications, including not only aging and inflammation in the elderly, but also infectious diseases, inflammatory diseases, etc. The MCC100 is a panel of isolated and purified faecal microbiota species and strains that can be used in different combinations and proportions to prepare artificial consortia that can be used to rectify human diseases where alteration of the microbiota composition (dysbiosis) is implicated. The strains have been extensively characterised so that rational choices can be made among multiple isolates of the same species to deliver a consortium most appropriate for the particular application.

[0123] In certain embodiments of the eighth aspect of the invention, the original artificial bacterial consortium comprises, consists essentially of or consists of the genera shown in Table 3 (the Microbiome Culture Collection 100 (MCC100)).

[0124] Also provided is a modified artificial bacterial consortium for use in treating frailty or inflammation associated with ageing. The modified artificial bacterial consortium may be prepared using the method described above.

### Treatment

[0125] The treatment (i.e. the composition or the one or more strains) may be administered alone or may be administered as a pharmaceutical or probiotic composition which will generally comprise a suitable pharmaceutically acceptable excipient, diluent or carrier. The pharmaceutically acceptable excipient, diluent or carrier may be selected depending on the intended route of administration. Examples of suitable pharmaceutical carriers include water, glycerol and ethanol.

[0126] Treatment may be combined with one or more standard treatments or probiotics for the disease or condition in question

[0127] The treatment may be administered to a subject in need of treatment via any suitable route. In particular, the treatment may be administered orally or rectally. Routes of administration therefore include oral and rectal administration.

[0128] In certain embodiments of the invention, the composition is formulated for administration orally or is administered orally, for example, as capsules, tablets, powders, granules, microparticles or nanoparticles. In certain embodiments of the above aspects, the composition is formulated as a probiotic. In certain embodiments of the above aspects, the composition is formulated as a live biotherapeutic product. The composition may be provided as a food, as a drink or as a food supplement. The composition may be configured for targeted release of the one or more strains in the intestine of the subject. In certain embodiments of the above aspects, the composition is formulated for administration by, or is administered rectally, for example as a suppository. In certain embodiments of the above aspects, the composition is formulated for administration by, or is administered by, techniques used for faecal microbiota transplantation (FMT), such as colonoscopy or nasojejunal gastroscopy.

[0129] The treatment is typically administered to a subject in a “therapeutically effective amount”, this being an amount sufficient to show benefit to the subject to whom the treatment is administered. The actual dose administered, and rate and time-course of administration, will depend on, and can be determined with due reference to, the nature and severity of the condition which is being treated, as well as factors such as the age, sex and weight of the subject being treated, as well as the route of administration. Further due consideration should be given to the properties of the treatment, for example, its concentration in the formulation, as well as the route, site and rate of delivery. Prescription of treatment, e.g. decisions on dosage, etc., is ultimately within the responsibility and at the discretion of general practitioners and other medical doctors, and typically takes account of the disorder to be treated, the condition of the individual patient, the site of delivery, the method of administration and other factors known to practitioners.

[0130] Dosage regimens can include a single administration, or multiple administrative doses. The treatment can further be administered simultaneously, sequentially or separately with other probiotics, therapeutics and medicaments which are used for the treatment of the disease or condition for which the treatment is being administered.

### Example 1 - Preparation of Original Artificial Bacterial Consortium (MCC100)

[0131] Initially, a culture collection was achieved by using 25 different culture media to anaerobically isolate commensal microbes from the fresh faecal samples of seven healthy donors. A collection of 696 purified isolates was obtained and the species were identified by 16S rRNA gene sequencing analysis. The isolates belonged to 89 bacterial species from 39 different genera and 4 bacterial phyla, and one archaeon species. Recent major studies defining the core human gut microbiota composition including those that describe the elderly microbiota were reviewed, and the isolated taxa were classified as present or absent in the core microbiota. In order to reproduce the configuration of a healthy gut microbiota, and noting the taxa that are present in the core healthy gut microbiota, 73 commensal species belonging to 36 different genera were thus selected from the initial collection. 22 of the 73 species were singleton strains. For the others 51 species, RAPD-PCR analysis was performed in a subset of 171 isolates - up to 5 isolates per species from different donors were analysed when possible. At least two different primers were used with each isolate. 117 different profiles out of 171 isolates were obtained. In total, a collection of 139 different strains was thus identified. Finally, 100 different strains were selected, reflecting species with high abundance in a comparative analysis of the published core microbiome (Table 3). In order to maximize the genetic diversity of the consortium, strains were selected considering their lowest genetic similarity according to dendrograms that were constructed from the RAPD-PCR patterns. The defined consortium of 100 strains mimicking a healthy gut microbiota composition was termed the Microbiome Culture Collection 100 (MCC100). The inventors estimate that the consortium covers >90% of the most abundant species identified in the human faecal microbiota.

TABLE 3

Genera selected for the consortium MCC100. The numbers of species and strains per genera are indicated. Taxonomic assignation performed by BLASTing whole genome sequences against filtered RDP database

| | No. species | No. strains |
|---|---|---|
| Phylum Firmicutes | 44 | 62 |
| Anaerostipes | 1 | 3 |
| Blautia | 3 | 5 |
| Butyriciccocus | 1 | 1 |
| Catenibacterium | 1 | 1 |
| Clostridium sensu stricto | 1 | 1 |
| Clostridium XIVa | 8 | 10 |
| Clostridium XIVb | 1 | 1 |
| Coprococcus | 3 | 5 |
| Dorea | 2 | 4 |
| Enterococcus | 2 | 3 |
| Faecalibacterium | 1 | 3 |
| Flavonifractor | 1 | 1 |
| Fusicatenibacter | 1 | 1 |
| Gemmiger | 1 | 1 |
| Lachnospiracea Incertae Sedis | 4 | 6 |
| Lactobacillus | 4 | 4 |
| Oscillibacter | 1 | 1 |
| Robinsoniella | 1 | 1 |
| Roseburia | 2 | 3 |
| Ruminococcus | 3 | 4 |
| Streptococcus | 1 | 2 |
| Veillonella | 1 | 1 |
| Phylum Bacteroidetes | 17 | 25 |
| Alistipes | 1 | 1 |
| Bacteroies | 11 | 18 |
| Barnesiella | 1 | 1 |
| Odoribacter | 1 | 1 |
| Parabacteroides | 2 | 3 |
| Prevotella | 1 | 1 |
| Phylum Proteobacteria | 4 | 5 |
| Desulfovibrio | 1 | 1 |
| Escherichia/Shigella | 2 | 3 |
| Sutterlia | 1 | 1 |
| Phylum Actinobacteria | 4 | 7 |
| Bifidobacterium | 2 | 4 |
| Collinsella | 1 | 2 |
| Propionibacterium | 1 | 1 |
| Kingdom Euryarchaeota | 1 | 1 |
| Methanobrevibacter | 1 | 1 |

[0132] The whole genomes of the 100 strains were sequenced and the identity of the strains was validated by BLASTing the contigs against a filtered version of the RDP database with 16S genes sequences, confirming the 100 strains belonged to 70 different species (Table 3). 37 out of the 100 genomes sequenced are currently classified among the list of the Human Microbiome Project (HMP) “Most wanted” taxa for whole-genome sequencing priority. To further investigate the safety of the selected strains, their Minimum Inhibitory Concentration values for a panel of 7 antibiotics were determined using the E-test gradient strip method. Gram-negative bacteria (n=31) were tested for sensitivity to benzylpenicillin, amoxicillin-clavulanic acid, chloramphenicol, clindamycin, imipenem and metronidazole. Gram-positive bacteria (n=68) were also tested for vancomycin sensitivity. The Methanobrevibacter smithii MCC662 isolate could not be tested due to its inability to grow on plates. Amoxicillin-clavulanate inhibited the growth of all 99 bacterial strains (FIG. 5). Imipenem inhibited 98 strains, with one strain showing intermediate resistance. Moreover, 93 strains were sensitive to chloramphenicol, 86 to clindamycin, 83 to metronidazole, 54 to benzylpenicillin and 63 out of 68 to vancomycin. Nevertheless, resistance to some antibiotics has been reported to be intrinsic in specific bacterial groups. Indeed, 48 strains had no resistance to any antimicrobial tested and 31 strains had endogenous resistance to up to 4 antibiotics, but this endogenous resistance presents a minimal risk for horizontal spread. All 99 of the bacterial strains could be inhibited by using amoxicillin-clavulanate or combinations of imipenem with any of the other antibiotics tested, or metronidazole with chloramphenicol.

### Example 2 - Gut Microbiome Alterations Associated with Increased Frailty in the Elderly

[0133] As described below, the identification of the key group of species involved two key steps (a. discovery and b. validation). The discovery step was to identify a group of species that decreased with increasing frailty in the elderly population. For this, the inventors focussed on the ELDERMET cohort of elderly Irish individuals (aged between 64-102 years of age). Shotgun faecal microbiome data for 215 individuals of this cohort was available, along with associated frailty indices and metabolomic profiles. This enabled the inventors to associate specific taxa with frailty changes. Using a combination of machine-learning and comparative statistics, the inventors identified a specific set of taxa that were predictive and demonstrated significant association with either increasing or decreasing frailty. While the identification of these specific taxonomic groups was significant, these associations could also be cohort-specific (i.e., Irish) or prevalent only within the elderly. Therefore, to validate their findings on a global scale (in the next validation step), the inventors utilised a second cohort of more than 2500 individuals belonging to multiple geographical locations (available in the curatedMetagenomicData repository of ExperimentHub database). While frailty status was not available for these individuals, there was data available on their disease status. The inventors hypothesised that if a species was therapeutic (prevented or delayed the onset of frailty), it should also have a high likelihood of being decreased in multiple diseases in this global cohort. Using region-homogenized machine learning based comparisons, the inventors identified a core-set of multi-disease markers that were either increased or decreased in multiple diseases in this global cohort. Importantly, a core group of six species overlapped between the two analyses. Other species like Faecalibacterium prausnitzii, which, although were not validated in the curatedMetagenomicData cohort, have been associated with reduced frailty in TwinsUK cohort. The inventors hypothesised that this core group of species, namely, Coprococcus catus, Eubacterium rectale, Alistipes putredinis, Barnesiella intestinihominis, Roseburia hominis, Dorea longicatena and Faecalibacterium prausnitzii, if administered as a therapeutic formulation, could prevent or delay the onset of frailty/disease in elderly subjects. Using a combination of analysis on multiple cohorts, the inventors thus identified this group of species for use as live biotherapeutics for both the physical and mental wellbeing of the elderly.

### Materials and Methods

### Data Collection from the curatedMetagenomic Data Repository

[0134] Since the focus of investigation was the gut microbiome, a subset of the curatedMetagenomic Data, containing 4,195 stool samples was selected (annotated as ‘body_site’: stool). Samples which did not have defined age and study-condition were removed, thereby filtering the dataset to 3,580 samples. From this set, samples having age less than 20 years of age were further removed (retaining 2,564 samples). Notwithstanding the uniform bioinformatics analysis strategy applied to this data, two major factors that may contribute an artefactual bias in multi-cohort microbiome datasets (and which were available in the metadata) are the read-length (obtained from the sequencer) and DNA extraction methodologies (which are study-specific). To test the effect of these factors, samples from Peruvian, African and Fijian individuals were first removed in order to remove the confounding effects of region/life-style-specific, along with those from hospitalized individuals. Subsequently, on the remaining subset, the inventors evaluated the effect of these factors using envfit on the species level profiles by first visually comparing the differences using PCoA and then testing the confidence of these differences using envfit. For this purpose, the inventors performed 20 boot-strapped envfit iterations, each time taking a subset of samples (sub-sample size: 200) and computing the R²and the significance (P-value) of the differences, and then comparing the distribution obtained with that obtained using a null distribution obtained by taking 200 sub-samples (after permuting the labels). The inventors established that while read lengths had a marginal effect (R=9e-3, P < 0.06) (FIG. 1), samples from one of the studies (Schirmer, M., Smeekens, S. P., Vlamakis, H., Jaeger, M., Oosting, M., Franzosa, E. A., et al. (2016). Linking the Human Gut Microbiome to Inflammatory Cytokine Production Capacity. Cell, 167(4), 1125-1136 e1128. doi:10.1016/j.cell.2016.10.020), using a DNA extraction technique tagged as ‘Illuminakit’ in the metadata, had a distinct taxonomic profile. The inventors removed the 465 samples of this study from all further analyses, thereby reducing the effect of extraction methodology on taxonomic profiles (P < 0.09; FIG. 1). To this compiled list, the inventors added the samples from four recently published datasets (one IBD-specific dataset of 220 samples, referred to as ‘FranzosaEA_2018’ (Franzosa, E. A., Sirota-Madi, A., Avila-Pacheco, J., Fornelos, N., Haiser, H. J., Reinker, S., et al. (2019). Gut microbiome structure and metabolic activity in inflammatory bowel disease. Nat Microbiol, 4(2), 293-305. doi:10.1038/s41564-018-0306-4)); three CRC-Specific datasets referred to as ‘WirbeIJ_2019’, ‘ThomasAJ_Cohort1’ and ThomasAJ Cohort2’ (Thomas, A. M., Manghi, P., Asnicar, F., Pasolli, E., Armanini, F., Zolfo, M., et al. (2019). Metagenomic analysis of colorectal cancer datasets identifies cross-cohort microbial diagnostic signatures and a link with choline degradation. Nat Med. doi: 10.1038/s41591-019-0405-7; Wirbel, J., Pyl, P. T., Kartal, E., Zych, K., Kashani, A., Milanese, A., et al. (2019). Meta-analysis of fecal metagenomes reveals global microbial signatures that are specific for colorectal cancer. Nat Med. doi:10.1038/s41591-019-0406-6). This repository, along with the 189 shotgun sequenced samples from the ELDERMET cohort, resulted in a total of 2,564 samples.

### Effect of Host-Associated Factors, Including Age Groups on the Microbiome Profile

[0135] Some of the investigated metadata were observed to be redundant and had similar associations (examples included groups like Country and Dataset Name; Age and Age-category; Study condition and Disease; Antibiotics current use and Antibiotics family). In these cases, the inventors retained the former metadata and removed the latter ones. The inventors added another region-specific metadata, namely Continent, for reasons explained in the subsequent section. Subsequently, the inventors filtered out those metadata present in less than 30% of the samples. A total of six metadata remained. The inventors obtained the association of each of these metadata using PERMANOVA (using the adonis function of the vegan R package).

[0136] For investigating the variation of the microbiome with age across the adult-hood landscape, the individuals were binned into three age groups namely young (20-40 years of age), middle-aged (40-60 years) and elderly (60-80 years). The inventors removed the antibiotic-treated subjects from all subsequent analyses. Principal component analysis of the microbiome profiles of the samples belonging to the three age-groups was performed and plotted using dudi.pco and s.class function of the ade4 R package. The significance of the association was obtained using the PERMANOVA (adonis function) implemented in the vegan R package (with ‘country’ as a confounder).

### Grouping Samples Into Continent-Specific Bins

[0137] Given that regional factors had the highest effect on the microbiome composition, it was important to ensure regional homogeneity for comparative disease-association analysis. However, the majority of disease-specific cohorts either displayed significant differences in age difference in the age of the control and diseased individuals (i.e. they were not age matched) or biases for disease patients from specific age-groups (FIG. 1A). Grouping the samples into continent-level bins would address the issue of limited sample numbers for various diseases across the age-groups, whilst maintaining regional homogeneity of the cohorts (FIG. 1A). To compare the overall effects of the two regional factors, country and continent, on the microbiome profiles the inventors performed bootstrapped PERMANOVAs (by taking 20% subsets) within the control individuals. The results indicated that, although continent was observed to have a marginally lower effect on the microbiome composition compared to nationality (country), performing repeated bootstrapped comparisons indicated the effect of continent to have a higher significance (calculated as -log of Adonis P-values) than the country on the microbiome profiles (FIG. 1A). For each disease, the continent specific affiliations of the disease cohorts were first obtained. Subsequently, the inventors performed all subsequent performing the investigations pertaining to each disease by pooling samples belonging to the same continent as the corresponding disease cohorts. This was expected to optimally homogenize the region-specific variations, while ensuring enough representation of various diseases (and controls) across age-groups.

### Disease Classification Using Random Forest

[0138] For each disease-age group combination (that is identifying the disease-associated markers in a specific age-group), the inventors performed 100 iterations, such that in each iteration, the inventors trained the classifier on a subset of disease and the same number of control samples (denoted as ‘training subset , n=20) (belonging to an age-group). The classifier performance (in terms of the sensitivity, specificity and AUC) was subsequently tested on a subset of the remaining samples within that age-group, as well as on randomly selected equally sized subsets of samples (denoted as ‘testing subsets). For a given disease, to ensure that the observed changes were not artefactual consequences of differences in sizes of training and testing subsets (for each of the testing age-groups, n=20), the inventors kept the training and testing subset sizes constant across all training age-groups. The classification AUCs, Specificities and Sensitivities were computed using the various modules in the pROC package.

### Identifying the Top Disease-Associated Markers for the Different Age-Groups

[0139] For each disease-age group scenario (as described above), the inventors ranked the species-level taxa in decreasing order of their importance scores (mean decrease in GINI). The taxa having importance scores in the top 15 percentile (that is higher than 85 percentile) were identified as the top 85 percentile predictors/markers for a given disease in that age-group. The inventors then focussed on the species detected as being within the set of the top 85-percentile markers across at least one age-group.

### Determining the Directionality of Disease Association for the Top 85 Percentile Markers in Each Disease-Age Group Scenario

[0140] To obtain the directionality (increased or decreased in disease) of the top 85 percentile markers corresponding to a disease in an age-group, Mann-Whitney U tests were performed to compare their abundances in the control and diseased samples from the specific age-group. To further ensure that the results thus obtained were not affected by regional variations in microbiome composition, the inventors restricted these comparisons to the disease-specific continent cohorts. Nominal P-values obtained after the Mann-Whitney U tests were adjusted using Benjamini-Hochberg correction. The top markers having significant change in their abundance with FDR corrected P-values < 0.05 were then filtered (FIG. 3). The directionality of these markers was assigned based on the trends of their abundance patterns, as either ‘Increased’ or ‘Decreased’ in disease.

### Creation of Generic Disease Prediction Models and Identification of Shared Disease Markers

[0141] The generic disease prediction classifiers were developed in a manner similar to that shown in FIG. 1. The only difference was the agglomeration of equal number (n= 10) samples from each of the diseases, rather those of a specific disease as described below. For each age-group (young/middle-aged or elderly), a specific disease cohort was created by taking equally size sub-samples from each disease (to remove biases in the classifiers originating from specific diseases). The sub-sample size was also kept same across the age-groups to ensure uniformity in the testing and training sizes of the classifiers across all age-groups. The iteration was subsequently repeated five times using a different (but equally sized) subset of diseased and control samples (as described above). The AUC and sensitivities for the five repetitions were then merged and compared across the young/middle-aged and elderly. To remove regional biases in microbiome compositions affecting these results, all analyses were restricted within the disease-specific continent cohorts (FIG. 1).

### Identification of Frailty-Associated Markers

[0142] The inventors used a random forest model to regress both the Functional Independence Measure (FIM) and the Barthel Score (both an inverse measure of frailty) of an individual from the microbiome profile. Random forest regression training was performed on 20% of the samples and tested on the remaining 80%. The ranked feature importance scores of the different species were then obtained. Microbiome features (that is the species) were ranked in decreasing order of their feature importance scores (mean decrease in GINI coefficient upon excluding the feature). The inventors subsequently divided the individuals into three equal tertiles, frail, medium frail and normal, based on their FIM values. Within these three groups, for the top 100 markers thus detected, the inventors performed comparisons (using Kruskal-wallis H test, post-hoc using dunns’ test) to identify which of the markers exhibited significant differences across the three groups. The inventors then compared the overlap of these markers with the disease-associated markers shared across multiple diseases in at least one of the three age-groups.

### Creating Metabolite Species Maps and Obtaining the Metabolic Signature of a Given Group of Species

[0143] The inventors utilised the literature-curated experimentally annotated species to metabolite (production/consumption) associations available as part of the Virtual Metabolic Human database as well as those obtained in a recent meta-analysis by Sung et al (Noronha, A., Modamio, J., Jarosz, Y., Guerard, E., Sompairac, N., Preciat, G., et al. (2018). The Virtual Metabolic Human database: integrating human and gut microbiome metabolism with nutrition and disease. Nucleic Acids Res. doi:10.1093/nar/gky992; Sung, J., Kim, S., Cabatbat, J. J. T., Jang, S., Jin, Y. S., Jung, G. Y., et al. (2017). Global metabolic interaction network of the human gut microbiota for context-specific community-scale analysis. Nat Commun, 8, 15393. doi:10.1038/ncomms15393), to create a species-to-metabolite map of more than 300 metabolite production and consumption profile corresponding to 992 species in a 0 (absent) and 1 (present) notation. For each microbiome, the metabolite production/consumption capability was then obtained as the matrix inner product of the abundance profile of the species and the species-to-metabolite map thus obtained. To identify metabolite profiles significantly associated with a group, the number of species in this group harbouring each metabolite was first obtained and compared with that obtained for the other species not present in this marker list using Fishers’ exact test. The four values, namely the number of species in the marker group harbouring a metabolite profile, the number of species in the marker group not harbouring the profile, the number of other species harbouring the metabolite profile and the number of other species not harbouring the metabolite profile were input as a contingency-matrix to the fisher.test function of R. Markers with fold change greater than 1 and nominal p < 0.05. A Benjamini-Hochberg correction of p-values was then performed on this subset using p.adjust function of R. Metabolite profiles with corrected p-values of less than 0.1 were finally identified. The above approach was also applied for the shared gain (G1-G3) and loss (L1-L3) groups.

### Results

### Identification of Disease-Associated Microbiome Markers

[0144] A stepwise methodology was adopted to reduce the confounding effects of DNA sequencing/extraction methodologies on the microbiome profiles from the different studies (See Methods; FIG. 1), and subsequently retained samples from individuals with age in the range of 20-89 years (excluding cohorts where the “controls” also consisted of hospitalised patients). This data set was supplemented with 475 shotgun metagenome profiles from recently published studies on IBD (Franzosa et al., 2019) and CRC (as “Validation” cohorts) (Thomas et al., 2019; Wirbel et al., 2019), finally assembling a collated set of microbiome taxonomic profiles from more than 2,500 samples (including the 189 ELDERMET samples used later in the study).

[0145] The interaction of metadata with taxonomic profiles was next investigated. After filtering out redundant and sparse (recorded for less than 30% of the samples) metadata types (See Methods), regional factors namely country and continent had the largest interaction with gut microbiome composition (FIG. 1A). Regional factors reflect the ethnicity and other socio-economic properties of the study populations, which has a dominant effect on gut microbiome architecture and microbiome-based disease signatures. Age and study-condition (disease versus control status) were the second major effect. The variation of the apparently “healthy” microbiome across the age landscape was explored using Principal Component Analysis of 1,175 gut microbiome profiles from exclusively “control” individuals from the age-groups ‘20-40’ (categorized as “Young”), “40-60” (“Middle-Age”) and “60-80” (“Elderly”). The elderly controls had a distinct microbiome composition compared to the young and the middle-aged (FIG. 1B), in line with previous findings.

[0146] Given that regional factors like country or continent had the highest effect on the gut microbiome composition, any investigation into disease-specific microbiome signatures for the various diseases required the comparisons to be performed within geographically homogeneous sub-populations (or study cohorts) to ensure that any differences in disease signatures were not simply driven by regional variations in gut microbiome composition. This issue was addressed by grouping the samples into continent-level cohorts. This ensured sufficient representation of samples from the three different age-groups for all diseases (FIG. 2).

[0147] Subjects were divided (in the continent-specific cohorts corresponding to each disease) into three 20-year age bands (as described above) and 100 iterations performed, each time training Random Forest classifiers on a subset of samples belonging to an age band, and evaluating the disease classification performance on the samples from the same age band (excluding the samples used for training) or the different age-bands.

[0148] For each disease, the age-group specific feature importance scores for each species was computed and the species having marker scores in the top 85 percentile individually for each of the age-groups was identified.

### Age-Specific Changes in the Directionality of Taxon Abundance Alterations for Specific Diseases, and Overlap of Taxa in the Species-Level Microbiome Response Shared by Multiple Diseases

[0149] The inventors next investigated if the diseases were characterised by distinct patterns of microbial taxon gain or loss, even across the different age-groups. For each disease-age-group scenario, the inventors determined for the directionality (increased versus decreased in disease) of association of the corresponding top 85-percentile disease-predictors by comparing their abundance trends in ‘region-matched’ control and diseased samples (See Methods). Across the age-groups, for four of the five diseases (i.e. not cirrhosis), there was a change in the directionality of the microbiome alteration, characterised by a significant reduction in the number of gained features with older age (FIG. 3A). Thus, the microbiome alterations in most of these diseases are characterised by a gradual shift from a state dominated by gained microbiome components to an increasing loss of control-associated taxa in the elderly. The above results highlight that the loss of specific beneficial taxa is more important for disease onset in elderly individuals than gain of pathobionts. It further highlights that, for the elderly, microbiome-restoration strategies may be important for maintaining a positive health status.

[0150] The overlap of altered taxa across diseases reported in one study was 51%, while another study reported that generic control versus disease classifiers trained by agglomerating disease samples from multiple studies could still distinguish controls from disease with an AUC of greater than 0.8. The inventors could identify specific groups of species that displayed consistent trends of associations with multiple diseases only within certain age-groups. The first group had elderly-specific associations with multiple diseases and included Barnesiella intestinihominis, Collinsella aerofaciens, Bifidobacterium longum (each detected across four diseases), Alistipes senegalensis, Anaerostipes hadrus, Clostridium leptum, Alistipes indistinctus and Eubacterium ramulus. The second group, including Streptococcus salivarius and Ruminococcus gnavus, displayed multiple disease associations, only within the young/middle-aged. Given that microbiome composition changes with age, the inventors investigated the effect of age on the extent of these shared disease responses. The inventors designed generic disease classifiers (using Random Forest), taking equally sized sub-samples of controls and diseased individuals (containing equal number of samples from each disease to prevent disease/age-group specific biases in classification performance (FIG. 3). While the performances of the generic disease prediction models in the young/middle-aged was high (median AUC: 0.79) and similar to those reported by earlier studies, the same models applied to data from elderly subjects had significantly lower performance AUC (P < 1e-7) (FIG. 3B). Moreover, in these models, while no significant differences were observed with respect to the disease prediction sensitivities (P < 0.13), the specificity of prediction (that is the accuracy of identifying healthy individuals) was significantly lower for the elderly. This was not an effect of the differential representation of samples from the different diseases, as the inventors had ensured equal representation of all diseases across all age-groups. Thus, in contrast to previous meta-analyses, the shared disease response was significantly lower across elderly subjects, primarily with respect to the discrimination of non-diseased individuals. It indicates that with ageing, the microbiome differences that emerge between the healthy and the diseased subjects become progressively weaker, further re-iterating that the retention of health-associated species is more important for the elderly. Furthermore, the inventors clarification of the effect of age on disease-associated taxa provides a refined set of features for improved microbiome-based diagnostics for these diseases.

[0151] Next, the inventors sought to characterise the elements of the shared disease response. Notably, closer inspection of the directionality of the associations indicated specific taxa with consistent trends of association with multiple diseases (based on the trend shown in FIG. 3). The overall patterns of taxon gain or loss encompassed several trends observed by earlier studies. For example, Streptococcus anginosus and Fusobacterium nucleatum were detected as gained in multiple diseases. Similarly, species belonging to Roseburia spp. (R. hominis) were lost. The inventors identified a total of 57 species that showed consistent directionality of association with multiple diseases in either young/middle-aged or the elderly age-groups (FIGS. 3C and 3D). Based on their differential detection profiles in the shared response across age-groups, the inventors assigned these into six different groups, namely G1 (increased in disease across all age groups), G2 (increased in disease only in the elderly), G3 (increased only in young/middle-aged), L1 (decreased in disease across both), L2 (decreased only in the elderly) and L3 (decreased only in the young/middle-aged groups) (FIGS. 3C and 3D). Many of the species previously reported as associated with shared gain or loss across multiple diseases belonged to the G3 group, that is, they showed similar trends of gain or loss in disease (as reported earlier) in the young and the middle-aged groups, but not in the elderly. These included the Streptococci, Fusobacterium nucleatum, Escherichia coli and Bacteroides fragilis. In contrast, a separate group of species including Ruminococcus torques, Clostridium clostridioforme and Lactobacillus salivarius were associated with multiple diseases only in the elderly. Finally, the inventors identified a distinct group of species (G1) that was gained across diseases in both elderly and young/middle aged groups. These included a group of Clostridia (C.bolteae, C.symbiosum, C.hathewayi, C.citronae, C.asparagiforme) (FIG. 3C). These taxa have been identified in separate studies of different diseases and/or disease-like states, but are shown here, for the first time to be part of a shared gain response across diseases. Based on these findings, the inventors hypothesise that this specific G1 group of species constitute a shared disease response associated with a general patho-physiological failure in the affected individual.

### Reproducible Association of the G1 Disease-Positive Markers with Increased Frailty in Elderly Individuals From the ELDERMET Cohort

[0152] Frailty in the elderly is characterised by reduced function of multiple systems. The inventors investigated if the taxon associations with frailty could be experimentally validated in the ELDERMET cohort, for whom the inventors had both shotgun metagenome and faecal metabolomic data. Using Random Forest regression (with five-fold cross validation), the inventors could predict the frailty of an individual (testing both community- and residential care-dwelling subjects) based on frailty-associated taxa. Subsequently, the inventors identified the top 100 markers with the best predictive ability and compared their abundances across the frail, medium frail and normal (apparently healthy) individuals and identified a subset of markers that showed significant decrease in the frail group of individuals (FIG. 4; See Methods). Interestingly, a subset of 6 of these taxa were also observed to be reproducibly associated with a loss in multiple diseases in the curatedMetagenomicData. It was this group of taxa that were identified to be the inventors markers for amelioration of frailty.

### Discussion

[0153] FIG. 4 shows that certain species associated with either increased or reduced frailty in the ELDERMET cohort are also observed to be respectively increased or decreased in multiple diseases in the samples constituting the curatedMetagenomicData repository. Wilcoxon test were performed for statistical analysis. Given their reproducible association with reduced frailty and negative association with multiple diseases, the inventors hypothesise that the group of organisms detailed herein, when administered either together or in specific combinations as a live biotherapeutic consortium, have the potential to retain microbiome resilience and prevent or delay onset of multiple diseases and frailty.

### Example 3 - Use of Strains From MCC100 to Increase Alpha-diversity in an in Vitro Human Colonic Model

[0154] The capacity of the MCC100 to modulate elderly microbiota types was tested in an in vitro colon model. The fermentation system was inoculated with faecal samples from elderly donors - 3 healthy and 3 frail elderly microbiota types were used. Each sample was run with the MCC100 supplementation or without (control) in duplicate. The system was run for 3 days in continuous flow at 37° C. and pH 6.8. The microbiota composition of samples collected at time 0 (just after inoculation) and time 3 (after 3 days of culture) was analysed by 16S rRNA gene sequencing. Analysis of the time 0 samples showed the supplementation of the faecal samples with the MCC100 resulted in the expected increase of several alpha-diversity indexes, Chao1, Observed species, Shannon and Simpson being significantly different. After 3 days of culture and as a consequence of the microbial adaptation to the fermenter conditions, the alpha-diversity drops compared with time 0 values. However, samples supplemented with the MCC100 showed greater Shannon and Simpson indexes values than the control group, Simpson index being significantly different (FIG. 6). This outcome supports the hypothesis that administration of the MCC100, or a subset thereof, could add unique taxa or modify the abundances of the populations in complex communities (such is in humans). The analysis of the fermenter data by microbiota types indicates that the MCC100 was able to increase the alpha-diversity after 3 days of culture in both healthy and frail microbiota profiles, as indicated by the numerical rise of Shannon and Simpson indexes in the MCC100 supplemented groups compared with control groups. Alpha-diversity of frail samples also showed higher values for the indexes Chao1, Observed species and PD when MCC100 was added. Despite the indexes showing the same trend, the differences were not statistically significant, likely due to low power of the sample size. Furthermore, analysis of the microbial Beta-diversity by Unweighted UniFrac showed that frail samples supplemented with MCC100 mapped closer to the healthy samples than frail control samples after fermentation culture.

[0155] Modulation of the abundance of some well characterised, health-related taxa by MCC100 addition was observed at the end of the fermenter run. Indeed, an increase in the population of the health-related Faecalibacterium genus was reported, as well as increases in Sutterella and Escherichia/Shigella. The frailty-related bacterium Anaerotruncus showed a slight reduction and Clostridium XIVa abundance was also decreased. Comparison of unique and shared taxa between MCC100-supplemented and control samples indicated that the addition of MCC100 promoted maintenance of a greater number of species in both healthy and frail sample groups in this artificial system. Since MCC100 is a customizable consortium, different designs could be developed to optimise the modulation of taxa in different states of microbiota alteration (so-called dysbiosis).

[0156] In conclusion, a collection of commensal gut microbial isolates has been established by rationally selecting a consortium of 100 strains and defining their genetic relatedness, antibiotic susceptibility and genome coding capacity. The results indicate that the MCC100, or a subset thereof, could be used as a live biotherapeutic product since it modulates the gut microbiota of elderly donors by increasing the alpha-diversity in the in vitro human colonic model.

### Example 4

[0157] The inventors explored the mutual co-occurrence patterns of Coprococcuscatus, Eubacteriumrectale, Alistipesputredinis, Barnesiellaintestinihominis, Roseburiahominis, Dorealongicatena and Faecalibacteriumprausnitzii in a cohort of 189 elderly individuals constituting the ELDERMET² cohort and compared with the same obtained for younger individuals obtained from other Irish cohorts^{6,7}. The correlations were Spearman correlations and edges were drawn between pairs of species if a positive Spearman rho was observed between the two with FDR < 0.1. For this we first computed the correlations between all pairs. Positive correlations were selected and the p-value (or significance) of these correlations were computed. These p-values were then corrected using the Benjamini-Hochberg approach to get the FDR. Those pairs with FDR < 0.1 were deemed to have significant positive correlation of occurrence and edges drawn between them.

[0158] Each of the seven species had significantly positive correlation in its abundance with at least one of the other species (a total of 10 significantly positive correlations across all the seven species). However, only five of these interactions covering five species were retained in the younger individuals (FIG. 7A).

[0159] The inventors have also investigated the combined effect of the different bacterial strains. The inventors took four measures, namely Functional Independence Measure (FIM), Barthel Score (both indicative of physical well-being, higher is reduced frailty), Mini Mental State Examination (MMSE, indicative of Mental Well-being) and C-reactive protein (CRP) levels (indicating inflammation). Beneficial species of microbiome should have positive correlations with FIM, Barthel Score and MMSE and a negative correlation with CRP (inflammation status). The inventors hypothesized that if the species worked synergistically, each of the species should have associations in the same direction as mentioned above and, furthermore, the associations of the four measures should have stronger (positive or negative depending upon the measure) associations with the combined abundance of the seven species, than that observed for the individual species.. As shown in FIG. 7B, the inventors demonstrated a synergistic effect of the seven species (FIG. 7B) in not only reducing frailty, but also in reducing inflammation and cognitive decline.

[0160] In addition, combinations of pairs of each of the seven species of bacteria were assessed for synergy with respect to the four measures above i.e. Functional Independence Measure (FIM), Barthel Score (both indicative of physical well-being, higher is reduced frailty), Mini Mental State Examination (MMSE, indicative of Mental Well-being) and C-reactive protein (CRP) levels (indicating inflammation). The results are shown in Table 4A-D, which shows the Spearman Correlations of cumulative abundances of different pairs of species with (A) FIM (B) Barthel Score (C) MMSE score and (D) C-Reactive Proteins. The values along the diagonal indicate the Spearman correlations for the individual species. For each species, the total number of other species for which synergy is observed is also indicated (where cumulated effect is more than either of the individual ones). For Barthel Score, FIM and MMSE, the effect is positive association, for C-Reactive Protein the effect is negative association (abbreviations F.p.= Faecalibacteriumprausnitzii; C.c.= Coprococcuscatus; E.r.= Eubacteriumrectale, D.I.= Dorealongicatena, R.h.= Roseburiahominis, B.i.= Barnesiellaintestinihominis, and A.p. = Alistipesputredinis,

TABLE 4A

| (A) FIM | F.p. | C. c. | E.r. | D.I. | R.h. | B.i. | A.p. | Total number of other species with whom synergy is observed (Cumulative effect with another is more than either species alone) |
|---|---|---|---|---|---|---|---|---|
| F.p. | 0.19 | 0.23 | 0.32 | 0.25 | 0.22 | 0.27 | 0.24 | 5 out of 6 |
| C.c. | 0.23 | 0.22 | 0.33 | 0.26 | 0.24 | 0.28 | 0.26 | 6 out of 6 |
| E.r. | 0.32 | 0.33 | 0.32 | 0.34 | 0.33 | 0.36 | 0.34 | 5 out of 6 |
| D.I. | 0.25 | 0.26 | 0.34 | 0.25 | 0.26 | 0.29 | 0.28 | 6 out of 6 |
| R.h. | 0.22 | 0.24 | 0.33 | 0.26 | 0.17 | 0.25 | 0.24 | 6 out of 6 |
| B.i. | 0.27 | 0.28 | 0.36 | 0.29 | 0.25 | 0.24 | 0.26 | 6 out of 6 |
| A.p. | 0.24 | 0.26 | 0.34 | 0.28 | 0.24 | 0.26 | 0.20 | 6 out of 6 |

In 20 out of 21 total pairs of species, synergy was observed (that is the cumulated effect of the pair was more than the effect of either individual species alone)

TABLE 4B

| (B) Barthel Score | F.p. | C. c. | E.r. | D.I. | R.h. | B.i. | A.p. | Total number of other species with whom synergy is observed (Cumulative effect with another is more than species alone) |
|---|---|---|---|---|---|---|---|---|
| F.p. | 0.19 | 0.25 | 0.31 | 0.28 | 0.28 | 0.30 | 0.28 | 5 out of 6 |
| C.c. | 0.25 | 0.25 | 0.34 | 0.29 | 0.30 | 0.33 | 0.30 | 6 out of 6 |
| E.r. | 0.31 | 0.34 | 0.32 | 0.36 | 0.38 | 0.37 | 0.37 | 5 out of 6 |
| D.I. | 0.28 | 0.29 | 0.36 | 0.27 | 0.32 | 0.33 | 0.32 | 6 out of 6 |
| R.h. | 0.28 | 0.30 | 0.38 | 0.32 | 0.24 | 0.32 | 0.32 | 6 out of 6 |
| B.i. | 0.30 | 0.33 | 0.37 | 0.33 | 0.32 | 0.27 | 0.32 | 6 out of 6 |
| A.p. | 0.28 | 0.30 | 0.37 | 0.32 | 0.32 | 0.32 | 0.25 | 6 out of 6 |

In 20 out of 21 total pairs of species, synergy was observed

TABLE 4C

| (C) MMSE | F.p. | C. c. | E.r. | D.I. | R.h. | B.i. | A.p. | Total number of other species with whom synergy is observed (Cumulative effect with another is more than species alone) |
|---|---|---|---|---|---|---|---|---|
| F.p. | 0.06 | 0.14 | 0.15 | 0.18 | 0.18 | 0.16 | 0.09 | 0 out of 6 |
| C. c. | 0.14 | 0.19 | 0.23 | 0.27 | 0.24 | 0.24 | 0.17 | 4 out of 6 |
| E.r. | 0.15 | 0.23 | 0.18 | 0.26 | 0.24 | 0.25 | 0.18 | 5 out of 6 |
| D.I. | 0.18 | 0.27 | 0.26 | 0.25 | 0.26 | 0.27 | 0.20 | 4 out of 6 |
| R.h. | 0.18 | 0.24 | 0.24 | 0.26 | 0.19 | 0.24 | 0.20 | 5 out of 6 |
| B.i. | 0.16 | 0.24 | 0.25 | 0.27 | 0.24 | 0.18 | 0.18 | 4 out of 6 |
| A.p. | 0.09 | 0.17 | 0.18 | 0.20 | 0.20 | 0.18 | 0.11 | 3 out of 6 |

In 12 out of 21 total pairs of species, synergy was observed

TABLE 4D

| (D) CRP | F.p. | C. c. | E.r. | D.I. | R.h. | B.i. | A.p. | Total number of other species with whom synergy is observed (Cumulative effect with another is more than species alone) |
|---|---|---|---|---|---|---|---|---|
| F.p. | -0.19 | -0.27 | -0.30 | -0.21 | -0.22 | -0.23 | -0.27 | 6 out of 6 |
| C. c. | -0.27 | -0.25 | -0.32 | -0.22 | -0.25 | -0.28 | -0.30 | 4 out of 6 |
| E.r. | -0.30 | -0.32 | -0.27 | -0.28 | -0.29 | -0.29 | -0.32 | 6 out of 6 |
| D.I. | -0.21 | -0.22 | -0.28 | -0.16 | -0.20 | -0.20 | -0.22 | 5 out of 6 |
| R.h. | -0.22 | -0.25 | -0.29 | -0.20 | -0.16 | -0.19 | -0.23 | 5 out of 6 |
| B.i. | -0.23 | -0.28 | -0.29 | -0.20 | -0.19 | -0.18 | -0.23 | 6 out of 6 |
| A.p. | -0.27 | -0.30 | -0.32 | -0.22 | -0.23 | -0.23 | -0.21 | 6 out of 6 |

In 19 out of the 21 total pairs of species, synergy was observed

### Example 5

[0161] The inventors further exemplified the importance of the ecological networks formed by the 7 species (Coprococcus catus, Eubacterium rectale, Alistipes putredinis, Barnesiella intestinihominis, Roseburia hominis, Dorea longicatena and Faecalibacterium prausnitzii) by examining their interaction or co-occurrence in the published NuAge dataset¹. The NU-AGE data is 16S amplicon sequence data, and so the interaction or co-occurrence patterns were computed within the OTUs derived from this 16S amplicon data. The inventors selected all the Operational Taxonomic Units (OTUs) belonging to the seven species. There were 82 OTUs in all. First, the inventors computed the Spearman correlations within these 82 OTUs and identified associations with Spearman Rho values >= 0.15 (P < 0.0001 for N=1224 samples in the NU-AGE cohort) as significant. The network is shown in FIG. 8A (edges between OTU pairs with significant associations).

[0162] A dense connected cluster is observed, that contains 78 of the 82 OTUs (encompassing all the seven species). This is a further validation of the co-occurrence tendencies of these taxa in the NU-AGE cohort. To further ensure that the extent of the positive correlations observed within these OTUs are significant and not expected by random chance, the inventors compared the ratio of positive and negative interactions observed within this set of 82 OTUs with the same values calculated between all other OTUs using Fishers’ exact test. The ratio of positive-to-negative interactions observed within this 82 OTUs subset was significantly higher (P < 2.2e-16) compared to that observed in general across all OTUs in the NU-AGE cohort, further highlighting co-occurrence tendencies among these taxa in the NU-AGE elderly cohort.

[0163] Thus, the results observed earlier for the ELDERMET cohort (as described in Example 4) were also independently detectable in the NU-AGE cohort, which is based on the 1224 microbiome sample from 612 subjects across 5 European countries. This shows that the inventors findings for these species are robust and are unaffected by geography and ethnicity. These findings underscore the fact that these bacterial species form unusual, distinctive, and heretofore unrecognized/unpublished interaction networks in elderly subjects. This provides supportive evidence for the ecological validity of replacing them in frail older people in whom these taxa are typically depleted.

[0164] Continuing the analysis on the 82 OTUs, the directionalities of the association of these OTUs were checked with the different markers of physical well-being, cognitive function and inflammation status.

[0165] The markers used were:
[0166] a) For inflammation, the levels of IL13, TNFa, GCSF, IL8, IL6, hsCRP, IL1b, TGFb1, IL17, IFNg, MCP1_MCAF, IL18 ranked across all samples.
[0167] b) For cognitive function, the scores of constructional praxis, Boston score for verbal fluency, and Babcok score ranked across all samples.
[0168] c) For physical well-being, Hand Grip Strength, and the negative of both Fried Scores, Gait Speed Time (because the latter are inversely associated with physical well-being) ranked across all samples.

[0169] For each of the three sub-categories, the ranked scores/levels for the individual markers/scores were aggregated for each sample to obtain a cumulative score for each sub-category.

[0170] The inventors then computed the ratio of positive and negative interactions (P < 0.01) observed for this subset of 82 OTUs with the three sub-category scores. As a comparison group, the same was also done for the set of all other OTUs observed in the NU-AGE data. The ratios of positive and negative interactions obtained for both groups were compared using Fishers’ exact tests to compute the directionality of the associations.

TABLE 5

The ratio of positive to negative interactions with the different markers of well-being observed for the subset of 82 OTUs versus all other OTUs.

| Well-being marker | Ratio of positive to negative interactions (P < 0.01) | | Fishers’ exact test P | Direction (n=82 versus the Global set) |
|---|---|---|---|---|
| | OTUs belonging to select species (n=82) | All Other OTUs | | |
| Inflammatory Markers | 0.33 | 1.41 | 0.03 | Significantly Enriched for Negative Association |
| Cognitive Function Markers | 3.33 | 0.73 | 0.01 | Significantly Enriched for Positive Association |
| Physical Wellbeing Markers | 4 | 0.47 | 7.00E-04 | Significantly Enriched for Positive Association |

[0171] The inventors observed a significant enrichment of positive interactions (of the subset of 82 OTUs) with Cognitive function and physical well-being, but an increase of negative interactions with Inflammatory marker levels, further showing the overlap between the results of ELDERMET and NU-AGE. A total of 37 out of 82 OTUs were associated with at least one of the three sub-categories (positively with Cognitive function and Physical Well-being and negatively with Inflammation).

[0172] To explore synergy, the inventors then focussed on this set of 37 OTUs and computed, for each sample, how many of these 37 were detected. The hypothesis was that if synergy existed, then the proportion of this subset of 37 detected per sample would be positively associated with markers of improved cognitive well-being and negatively associated with markers of inflammation and frailty. This is evident in Table 6.

TABLE 6

Spearman Association analysis of the detection rates (that is the number of the subset of 37 OTUs detected per sample) with the different markers of inflammation, frailty physical wellbeing and cognitive function

| Well-being marker | Spearman Rho | |
|---|---|---|
| | Rho | P-value |
| Inflammatory Markers | -0.14 | 5.60E-03 |
| Cognitive Function Markers | 0.16 | 7.40E-04 |
| Physical Wellbeing Markers | 0.12 | 0.003 |
| Combined Well-being | 0.23 | 1.00E-08 |

[0173] Although the absolute values of Spearman Rho were weaker, the associations were still significant, and the detection rates showed significant positive associations with Cognitive function markers and physical well-being and negative association with inflammatory markers. This clearly validates the existence of synergy among the OTUs of the seven species in the NU-AGE cohort

[0174] All documents referred to in this specification are herein incorporated by reference. Various modifications and variations to the described embodiments of the inventions will be apparent to those skilled in the art without departing from the scope and spirit of the invention. Although the invention has been described in connection with specific preferred embodiments, it should be understood that the invention as claimed should not be unduly limited to such specific embodiments. Indeed, various modifications of the described modes of carrying out the invention which are obvious to those skilled in the art are intended to be covered by the present invention.

1-24. (canceled)

25. A method of treating or delaying onset of frailty or inflammation related to aging in a subject in need thereof, wherein said method comprises administering to the subject in need thereof a composition comprising one or more bacterial species selected from the group consisting of Coprococcus catus, Eubacterium rectale, Alistipes putredinis, Barnesiella intestinihominis, Roseburia hominis, and Dorea longicatena, wherein said one or more bacterial species are isolated bacterial species or are comprised within a purified bacterial preparation comprising said bacterial species.

26. (canceled)

27. The method according to claim 25 , wherein the composition comprises at least two bacterial species selected from the group consisting of Coprococcus catus, Eubacterium rectale, Alistipes putredinis, Barnesiella intestinihominis, Roseburia hominis, and Dorea longicatena.

28. The method according to claim 27, wherein the at least two bacterial species comprise Coprococcus catus and Eubacterium rectale, Coprococcus catus and Alistipes putredinis, Barnesiella intestinihominis and Eubacterium rectale, Roseburia hominis and Dorea longicatena, Dorea longicatena and Eubacterium rectale .

29. The method according to claim 25 , wherein the composition comprises at least three, at least four, at least five, or at least six of said bacterial species.

30. The method according to claim 25 , wherein the composition comprises Coprococcus catus, Eubacterium rectale, Alistipes putredinis, Barnesiella intestinihominis, Roseburia hominis, and Dorea longicatena.

31. The method according to claim 25 , wherein the composition does not comprise Collinsella aerofaciens.

32. The method according to claim 25 wherein the composition does not comprise any one of Ruminoccus torques, Clostridium ramosum, Coprococcus comes, Flavonifractor plautii, or Streptococcus anginosus.

33. The method according to claim 25 wherein the composition does not comprise any one of Clostridium asparagiforme, Clostridium scindens, Clostridium leptum, and Bacteroides fragilis.

34. The method according to claim 25 wherein the composition further comprises Faecalibacterium prausnitzii.

35. The method according to claim 25 , wherein the bacteria in the composition consist essentially of Coprococcus catus, Eubacterium rectale, Alistipes putredinis, Barnesiella intestinihominis, Roseburia hominis, Dorea longicatena, and Faecalibacterium vrausnitziiprausnitzii.

36. The method according to claim 34 wherein the composition comprises Coprococcus catus, Eubacterium rectale, Alistipes putredinis,Barnesiella intestinihominis, Roseburia hominis, Dorea longicatena, and Faecalibacterium prausnitziiprausnitzii in the absence of any other bacterial species.

37. The method according to claim 25 , wherein the bacteria in the composition consist essentially of Coprococcus catus, Eubacterium rectale, Alistipes putredinis, Barnesiella intestinihominis, Roseburia hominis, and Dorea longicatena.

38. The method according to claim 25 ,wherein the composition comprises Coprococcus catus, Eubacterium rectale, Alistipes putredinis, Barnesiella intestinihominis, Roseburia hominis, and Dorea longicatena in the absence of any other bacterial species.

39. The method according to claim 25 wherein at least one of said one or more bacterial species is selected from the group consisting of Coprococcus catus comprising amino sequence SEQ ID No. 1 or a variant sequence having at least 90% sequence identity thereto, Eubacterium rectale comprising amino sequence SEQ ID No. 2 or a variant sequence having at least 90% sequence identity thereto, Alistipes putredinis comprising amino sequence SEQ ID No. 3 or a variant sequence having at least 90% sequence identity thereto, Barnesiella intestinihominis comprising amino sequence SEQ ID No. 4 or a variant sequence having at least 90% sequence identity thereto, Roseburia hominis comprising amino sequence SEQ ID No. 5 or a variant sequence having at least 90% sequence identity thereto, and Dorea longicatena comprising amino sequence SEQ ID No. 6 or a variant sequence having at least 90% sequence identity thereto.

40. The method according to claim 34, , wherein at least one of said one or more bacterial species is selected from the group consisting of Coprococcus catus comprising amino sequence SEQ ID No. 1 or a variant sequence having at least 90% sequence identity thereto, Eubacterium rectale comprising amino sequence SEQ ID No. 2 or a variant sequence having at least 90% sequence identity thereto, Alistipes putredinis comprising amino sequence SEQ ID No. 3 or a variant sequence having at least 90% sequence identity thereto, Barnesiella intestinihominis comprising amino sequence SEQ ID No. 4 or a variant sequence having at least 90% sequence identity thereto, Roseburia hominis comprising amino sequence SEQ ID No. 5 or a variant sequence having at least 90% sequence identity thereto, Dorea longicatena comprising amino sequence SEQ ID No. 6 or a variant sequence having at least 90% sequence identity thereto and Faecalibacterium prausnitzii comprising amino sequence SEQ ID No. 7 or a variant sequence having at least 90% sequence identity thereto..

41. A method of preparing a modified artificial bacterial consortium for use in treating frailty or inflammation related to aging, the method comprising:
comparing normal faecal microbiota of healthy subjects with faecal microbiota of a subject to be treated to identify alterations in the proportional abundance of one or more bacterial species selected from the group consisting of Coprococcus catus, Eubacterium rectale, Alistipes putredinis, Barnesiella intestinihominis, Roseburia hominis, and Dorea longicatena in the microbiota of the subject with the condition; and
adjusting the composition and proportional abundance of said one or more bacterial species in an original artificial bacterial consortium to provide a modified artificial bacterial consortium that rectifies the identified alterations.

42. The method according to claim 41, wherein the method comprises identifying the presence or absence of alterations in the proportional abundance of each of Coprococcus catus, Eubacterium rectale, Alistipes putredinis,Barnesiella intestinihominis, Roseburia hominis, and Dorea longicatena in the microbiota of the subject with the condition; and
adjusting the composition and proportional abundance of said bacterial species where alterations have been identified.

43. The method according to claim 42, wherein the method comprises identifying the presence or absence of alterations in the proportional abundance of each of Coprococcus catus, Eubacterium rectale, Alistipes putredinis, Barnesiella intestinihominis, Roseburia hominis, Dorea longicatena and Faecalibacterium prausnitzii in the microbiota of the subject with the condition; and
adjusting the composition and proportional abundance of said bacterial species where alterations have been identified.

44. The method as claimed in claim 42, wherein the original artificial bacterial consortium comprises the genera shown in Table 3.

The application's sequence listing, which the Patent Office published only in electronic form, follows.

SEQUENCE LISTING (21 sequences)

SEQ ID NO: 1 - protein, 1048386 aa, Coprococcus catus (residues 1-349,462 of 1,048,386)
  misc_feature (108137)..(108140): Xaa can be any naturally occurring amino acid
  misc_feature (108150)..(108153): Xaa can be any naturally occurring amino acid
  misc_feature (110019)..(110022): Xaa can be any naturally occurring amino acid
  misc_feature (116209)..(116212): Xaa can be any naturally occurring amino acid
  misc_feature (882802)..(882805): Xaa can be any naturally occurring amino acid
  misc_feature (947835)..(947838): Xaa can be any naturally occurring amino acid
  misc_feature (1006423)..(1006426): Xaa can be any naturally occurring amino acid
  misc_feature (1014059)..(1014062): Xaa can be any naturally occurring amino acid
  misc_feature (1031697)..(1031700): Xaa can be any naturally occurring amino acid
  misc_feature (1033187)..(1033223): Xaa can be any naturally occurring amino acid
  misc_feature (1037812)..(1037815): Xaa can be any naturally occurring amino acid
MIRRIFQNQVEKVVVLYKDRLLRFGFELIEYIASLYNCEIEIIDNTEKSEQQELVEDLVQIITVFSCKLQGKRANKAKKLIRELMQQEETDGKSHKSNVDTKQRTENMSKYYSIHEFSKIIGVSAQTLRNWDANGKLHPHHTTVSGYRYYSDEQLNQVINVKPKNRITIGYCRVSSHKQKDDLERQIDNVKTYLLAKGQPFEIISDIGSGINYKKKGLMALSVELHKKFKGFQMDVAFEHDGGSLGILGGSGMGKSMTLKMIAGLVKPDSGKVIVDGRIVYDSAAKIDMPARERHIGYLFQQYALFPTMTVTENIGIAMKKSGDAKKKEIDRLLEQFALQNLGGRMPNELSGGQQQRVALARILASEPQMLLLDEPFSALDSFLKEQLLEDMIRQLSDYAGDVIMVSHSRDEIYQFCDRLLILDQGRVIVTGDTKDIFDQPGYREAARLTGCKNITEAIKIAENSIEVPHWHCTLEVDETVADDIHAVGIRAHYIDVLIEKPENMKNVIGVTVENVSELPFEWYCFFRVPNGERIWWKVAKVGEHGAAKYLPQKGAHVYLHMPPQSIILLKMKTAIIATVVAFFGGIACARWAMKLKPLSKSILDGILNLPLVLPPTVAGFLLLLIFSLKRPLGIYLWEHYQLKVVLSWPGCVLAATVVAFPLMYRNARAAFEQVDVNYIYAGRTLGLSEWTIFRKVVIPVAGPGIASGTILTFARALGEYGATSMLAGNILGKTRTMAVAIAAEVSAQNYDVAGFWVIVLVTIAFVFIFAINIITMHGISKIQRWMKKLVSSVLVLCMIAVALAGCGNKNTETTKATEATASTEAAVSTEAVSETQAAEGEAATVQVYIAASLSNAMDEISVNYKSVQPNVDLVFNAGSSGKLQTQIEEGGACDVFFSAATKQMNALVEGGYVQEADVTDLLENKVQLIKPAGTETKVTGFENITDAANLALAADTVPVGQYAREIFNNLGITDQVMAMEINECEDVSAVLAAVSEGSNEVGIVYATDAASVADKVDVIATANDTELKSKVIYPVGLVKNTEADDAEVAAAKAFVDYLKTPEAAAVFEKYGFSCINMELKQLEAFVAVVDYNSFSEAARHLFLTQPTVSAHVASLEKELDTKLISRTTKKLHVTPQGYDLYDSAVSMLKIRDHILNEFVGSHKQIIELGASTIPSSYVLPEVLSAFGQLNPDIYFHSELSDSMGIIQQVENGRLDFGLVGMTTDSSELIFIPFLEDELVIVTPVTPHYLEISKKNVTIAAFLNEPFILREKGSGTKKAIDRYLEQQRIASGAINVVARMNDLEAVKRSIINGLGISILSAKSVQDLNASRQVLIFPLAHPAPTRKLYIVYKKEHALLPHVRRFIQFVRSYYQPQMSIDIRITQKGLLKKTLPLHVITGSDLCYGTSDGMKLKENDLSSDEIILYHSNHISRGFSIEWTPEKKDYVDLRALSPDSREGLNDFFAAIQRIASYWKCEIEMDGNITALSELVSLIPDMQAFNETVLESVCGDILSGKKESLTLYSVMFPVVLGVPEAEKFRHDVDAFGRWLHEKQSVDAYYARPQFFRTEVGVVGRYVVTEDCRTIFPLKGQVPLGISDPETGKGLKCDRYEVYFYSISQEKMLGYVPFETFIEIIKEQAERFDGANIIFEGLSMEALQKIVETAVMSALIVFIQKAIAQGIGMLFGATGEIITEKSGNLNLGVPGLMYMGGIAGLMGAFIYESGAENPSGIVGVLISMLCALLASGFGALIYSVLTITLRANQNVTGLALTTFGVGFGNFFGGSLSQLAGGVGQISVAVTGGTYRTKIPGLSKIPVIGDVLFSYGFMTYFGIILAILVSWFMYKSRKGLNLRAVGESPATADAAGINVTLYKYLATIIGGAISGLGGLYFVMEYSGGTWTNNGFGDRGWLAIALVIFALWKPINAIWGSFLFGALYILYLYIPGLGRSMQEIFKMLPYLVTIVVLIFTSFRKKKEYQPPESLGNSYFREERMFKDSSLHIAARDSIVWWKAWLIRLIAVLLSLIVCAIVIFGLTKMNPVEVYKGIFSGAVGTSRRAWVTIRDTMVLLLIAIGLTPAFKMKFWNIGAEGQILVGGAATAALMIYAGDSLPTPVLMILMFVASMAAGVIWGVIPAIFKAYFNTNETLFTLMLNYVAMQIVTFCIVYWENPAGSNTVGIINSATRAGWLPELGGLTYGWNVVIVLVFTIGMYIYMKYSKQGYEVAVVGESQDTARYARINVKRTIIRTMGISGGICGIAGFLLVSGASHTISTSTAGGRGFTAIIVAWLSKFNAFVMILVSFFLVFMGKGAIQIASQFNLNENASDVITGIILFFILGSEFFIRYRIAFTKAHKMVEAVNAIELKNITKRFGEKVIANDSVNLTVRKGEILSLLGENGSGKTTLMNMLSGIYFPDEGQIFVNGKEVMISSPKDAFDLGIGMIHQHFKLIEVLTAAENIILGLPGKMTLNMDEVIKDIQALVDKYGFELDCRKKIYEMSVSEKQTVEIVKMLYRGSDILILDEPTAVLTPQETEKLFAVLRNMRADGRSIIIITHKLHEVLALSDRVSVLRKGKYIGTVNTCDATESSLTEMMVGEKVSLNIDRPEPENPREILKVSGLTCLDNEGVKSLDDVSFTAFGGEILGVAGIAGSGQKELLEAITNLCPIAEGTISCVNEHGKEVVISGKSPEQISKESIHIAHISFVPEDRLGMGLVASMDMTDNMMLRSYREGKGIFADRKKPRELAERLIDKLSIVTPGVSTPVGRLSGGNVQKVLVGREIAMHPDILLVAYPVRGLDINSSYQIYNLMNEQKKKGVAVICVIEDLDVLLEISDRILVLCGGRVTGIVDGRTATKDEIGLLMTKGQKEESHVMKKILALVLTVVMAASLAACGNSGTKETQAPASGDSETAAESTAAESTAAESTGETAEKVGEGVDVKDLKVGFIFIGDENEGYTAAHYAGAKGMQEALGLSDDQIIIKWNIPEDETCYDAAVDLADQGCNIVFANSFGHESYILQAAAEFPDVQFCHATGYQAAGSGLANMHNYFTSIYESRYVSGVVAGMKLNEMIADGKITEDTAKVGYVGAYPYAEVISGFTSFFLGVRSQCPSATMEVKYTNSWASFDLEKECAESLIADKCVLISQHADTTGAPTACQAAGVPCVGYNISMIPTAPDAALTSASINWEPYYEYATKCVIDGTAIDTDWCKGFAEGADKLTDLNDKVVAEGTAEKVKEVEDAIIDGSLHIFDTSTFTVNGKELTDADSEYISDGYFHESEKASAPAFDFIIDGITAVTQMKLEKRKTEIVDTPKISVILKLADSLKTMTERDGILSCKEAMADLITFVTETGQIIRGSVMGAFEDDLSGKNYVIYTDNSINETGNYNIYAASYDPEQEDEQILIHAIETEAEWQRIEMMMQKLSKGPEGYGEMKILVSGGTGYIGSHTCVELLNKGYDVVAFDNLYNSKIDVVDRVEKITGKKLIFYKADMLDKESMRPIFEEHKFDAVIHFAALKAVGESVQKPLAYYKNNISGSLNLCELMNEYGCKRIIFSSSATVYGAPKTVPITEDFPLSTTNPYGSTKLMLERIFSDFCVPDPEWSVVLLRYFNPIGAHESGLLGESPNGIPNNLMPYIAQVAAGKLECLGVFGNDYDTPDGTGVRDYIHVVDLAKGHVNAVEKVTSSTGVNIYNLGTGIGYSVLDIVKAFEAANGIKIPYVIKPRRAGDIAICYANPGKAKRELGWEAKYDLERMCKDSWNFTKKSLGLEMKERLLREFAERFGNAEGAQVYFAPGRVNLIGEHTDYNGGHVFPCALDIGTYAVVRKRQDKRLFFYSMNYPEAGIINSSLTGQLEHDDEDGWANYPKGVIWAFEEKGMQPACGFEMMVYGNLPSGAGLSSSASLEVLTGWALRDIFEFEVSDQEIALISQHAENTFNGVRCGVMDQFAVAMGRAHQAIYLNTENLSYRYVPVQLQNMQLIISCTNKERGLADSKYNLRRMECERALADLQKVVSIRQLGELSMDDFEKYQAAITDDVCRRRARHAVSENARTIQAVQALENNDLNRFGRLMNASHQSLRDDYEVTGDELDALVEAAWDTEGVLGSRMTGAGFGGCTISLVRTEDVDNFIKNVGRIYRQQIGYPADFYICQIGGGPRKLMNGGMIRFILGSVLKVESVLLLFPCIVAVFYRESAGYWFLLTAVLSFVIGYLMVRKKPANTVFYLKEGCVTTALSWIMISLVGCLPFYLSGEIPAFTDALFETISGFTTTGASILSDVECLSQSILFWRSFSHWIGGMGVLVFLLAIIPLSGGSHMNLMRAESPGPSVGKLVPKVRATARILYLIYFGMTIVELIFLLIGKMPFLEAMMITFGTAGTGGFGVRNTSIGGYSAYIQWVVAIFMILFGVNFNAYYFLLMKRFKHAFDMEEVKGYFLIIAAASALIFINIYDKTMTAADTIRHVVFQVGSMMTSTGYSTVDFDLWPSASKVVLIIIMFIGACAGSTGGGIKVSRVIMMLKSVKRELNAYLHPKSVRTIKMEGKALDQGAISSVAVYFITFTLIFAVSFLLVALEGRDLTTNFTAVLTTMNNMGPGMADVGPSKNFGGLSILSKYVLMFDMLAGRLELFPMLVLFHPVLWKETWEGGKRRRRLKRKKSLENMAKDHKQGKRGLNIIIVGCGKVGASLTEQLYKEGHDITLVDRSSDRLQALTDMYDVMGIVGNGASYKIQREAGIDNADLMIAVTDSDELNLLCCTVAKRVGDCAAIARVRTPDYSDEASYLKEKLGLAMIINPEMEAANEITHVLSLPAALGVNSFAHGQAQMIRFKIPVNNRLDGQKVMAMARNISGDVLVCAVEREKQVFIPDGNFELHQGDVVSFIAASKAAKEFFERIGMPNKPVHNTMIIGGGKAAYYLGKMLLDMGIEVKIIEMDRKRCRELSVLLPQATIINGDGTDEELLKEEEIAYVDSLVPLTGIDEENVLLALHAREVSDAKVITKVNRNAFHNLIDKLDLGSVIYPKYITAEAIVAYVRAKQASMDSSNVETIYHMFDSRAEAIEFNVSASSRVTDVPLKDLNTKDNLLIACINRYGKIIIPGGMDCIQAGDTVVIVTTHTGFQNIEDILRMIKRKLALLGTAVAVSLLMTVPAFAADTKDTDTAQNAQNIQSVQEEKTEENTGYVTCSVLNVRRASSEKSDKVGTLKRGEEVKILRDEENGWYAIDFEGHIRYVHGDYITTDQDEVKGYTASSWDGPVLTASAGTITGPSGKETYYNLNMSGVVSIMRSLGNTDEYWVRDDGAKMLGNYVMVAANLNVHPRGSIVETSLGLGIVCDTGGFASGNSTQLDIAVNWMEPYYYQQMNKQKQSVYHAILQGITALADEFQIPAIEGPELYDVFFQLRLDHPEIFWATGFKYKYFKDSPNYIFIPEYIFEKNKIREHQRALKARVDKLIRPAKHLSDIEKEKYIHDFVCENVRYDKLKKAYSHEIIGPLGQGVGVCEGIAKSVKILCDALNLWCIIAICGNNPEKGIKYRHTWNIIRLDGKYYHLDATFDNSLGRSGSGAPEIRYDYFNLDDKAVFRDHEPLIAPAPACTDNSRFYYKEKKLSFTKTEEVYKRFLQAAKKGKTLTFHWRGGYLTREVLEELLDLMQQAGAVKNKTAVVGLNWAQAVLRLHYVESAEAGDENAEAANGAIGKGTHKAKIDVTMEDANEGEQIETDMNIQIFGTSKCFDSKKAMRYFKERGIKYQWIDMKEKGLSKGEYTKVKQAVGGLDAMLNQKCKDQDTLALIKYIADEDKDEKVLENQQVLKTPIVRNGAQETVGYQPDVWKGWKMAVPKYYEMYHSFLQSLSDGEEHPYSDVKKKVIEDFKLTDIELAELLPSGKQPVFSNRIGWCRTYLKKAGLIESPTKAHFMITKSGREVLKSGKKITNEVLREFPSFVKFIDGDTKKVKDTAEEKDSLNNDETPQETLERVYGELNNVLKDELLTRIHEKSPDFFEKMVVELMEKMGYGRGQITQKSRDEGIDGMVYQDKLGFDVIYIQAKRYDLEKTVGRPELQKFGGAIPEKNAKGLFVTTGRFSPDAQKYANDRHIILIDGQHLAELMIEHDFGVSTEYTYRIKRIDMDVFEEEDMYGTQAQHTKSWILSPFENDVKMYGTQAKGLYVEKIYQFENDVKMYGTQAFFDLRRAAFRFENDVKTYSMMIAPLSFENDVKMYGTQADCDGIVIQFWFENDVKMYGTQATSLLFYGLCSFENDVKMYGTQAELFEELERQGFENDVKMYGTQATEGFTAYPYMFENDVKMYGTQAPTGFDKMTRKFENDVKMYGTQAKPLQQMLIRMFENDVKMYGTQAQKNMFRIQLQFENDVKMYGTQACIMKMVHSELSGEIISESAAFTEWIIESPKYFSEYLHELYCQYEKDEGRFVLSQGDKILELSKYLEIIVNPFTVEINSRKILNKLYIKLEKVSKEEQMYEETLELTAYIHEYLMQLEQQTNYILSFDDNLEIPALLKAVGIKHEEMEDDFFERIIRYVKIAVEVLSTKVFVFVNIRSYLTDEQIQELIKEIRYQEAKILFMESQERACLEGGMRYIIDRDGCEIYMFFDLPTITGENRRAYTKFRKFLLKSGFIMLQESVYCKLALNQTAVKAIVENVRKNKPDEGLIQLLAVTEKQYAKMDLIIGTVKSEVLDSDERLVILMSWRIIVISKRAKLDLQLGKMVVRSDEITKIVLSEISTIIIESTAVSITASLISELAKRKIKVIFCDEKRNPSCELVNYYGSHDTSNKIRKQIAWKQQTKEAIWTEIVTDKIRKQKDLLELLRRKESALLDTYLKEITWNDGTNREGHAAKVYFNSLFGLDFTRTEDSLINAALNYGYSVLMSAFAREIVASGYLTQLGIFHDNMFNQFNLASDLMEPFRILIDREVLMMTLEVFQHSEKMQLVNVLNHEVRIDGKVQYVNNAIKIYCKSVFDALSEDDSALIRFYKIELMKQDYFLGLDMGTGSLGWAVTDSTYQVMRKHGKALWGTRLFESASTAEERRMFRTARRRLDRRNWRIQVLQEIFSEEISKVDPGFFLRMKESKYYPEDKRDAEGNCPELPYALFVDDNYTDKDYHKDYPTIYHLRKMLMETTEIPDIRLVYLVLHHMMKHRGHFLLSGDISQIKEFKSTFEQLIQNIQDEELEWHISLDDAAIQFVEYILKDRNLTRSTKKSRLIKQLNAKSACEKAILNLLSGGTVKLSDIFNNKELDESERPKVSFADSGYDDYIGIVEAELAEQYYIIASAKAVYDWSVLVEILGNSVSISEAKIKVYQKHQADLKTLKKIVRQYMTKEDYKRVFVDTEEKLNNYSAYIGMTKKNGKKVDLKSKQCTQADFYDFLKKNVIKVIDHKEITQEIESEIEKENFLPKQVTKDNGVIPYQVHDYELKKILDNLGTRMPFIKENAEKIQQLFEFRIPYYVGPLNRVDDGKEGKFTWSVRKSDAKIYPWNFTDVIDVEASAEKFIRRMTNKCTYLVGEDVLPKDSLVYSKFMVLNELNNLRLNGEKISVELKQRIYEELFCKYRKVTRKKLERYLVIEGIAKKGVEITGIDGDFKASLTAYHDFKERLTDVQLSQKAKEAIVLNIVLFGDDKKLLKQRLSKMYPNLTTGQLKGICSLSYQGWGRLSKTFLEEITVPAPGTGEVWNIMTALWQTNDNLMQLLSRNYGFTNEVEEFNTLKKETDLSYKTVDELYVSPAVKRQIWQTLKVVKEIQKVMGNAPKRVFVEMAREKQEGKRSDSRKKQLVELYRACKDEERDWITELNAQSDQQLRRDKLFLYYIQKGRCMYSGETIQLDELWDNTKYDIDHIYPQSKTMDDSLNNRVLVKKNYNAIKSDTYPLSLDIQKKMMSFWKMLLQQGFITKEKYVRLVRSDELSADELAGFIERQIVETRQSTKAVATILKEALPDTEIVYVKAGNVSNFRQTYELLKVREMNDLHHAKDAYLNIVVGNAYFVKFTKNAAWFIRNNPGRSYNLKRMFEFDIERSGEIAWKAGNKGSIVTVKKVMQKNNILVTRKAYEVKGGLFDQQIMKKGKGQVPIKGNDERLANIEKYGGYNKAAGTYFMLVKSLDKKGKEIRTIEFVPLYLKNQIEINHESAIQYLTQERGLNSPEILLSKIKIDTLFKVDGFKMWLSGRTGNQLIFKGANQLILSHQEAAILKGVVKYVNRKNENKDAKLSERDGMTEEKLLQLYDTFLDKLSNTVYSIRLSAQIKTLTEKRAKFIGLSNEDQCIVLNEILHMFQCQSGSANLKLIGGPGSAGILVMNNNITACKQISVINQSPTGIYEKEIDLMKLMNRNDHNYLEPDISVICDADKLTEYGCNGAPDWIIEIVSPSSQRMDYQIKLSDFLSMAVKLYHGDIVYTPSADALAVYENSYIAVDSGKVEGVYPVIPEKYKHAECIDYGRQMIIPAFSDLHVHGSQYVQRGIGMDCLLSNWLNHYTFPQEAGFKDLSYAKKCYDAFVDDMICHGTFHANVFGTIHREATDYLFRKMEEKGMYGFVGKVNMDCNSPEFLIETTEDSLRETEIYLDSHTGSGKVKPILAPRFAPTCSEKLMTGLGMLAAKYHCGVHTHLVESIWEAEEALRCFPGYHSDAEIYERAGLMDHGPSIFAHVIFPTEEDKRIMKEHGSFSVHCPDATTNIIAGIMPLAAMHDEELKIAIGSDVAGGHSIAIYKQIARAVQLSKLKEFYEPDQSQTITLTQAFYHATKEAGSVFGKVGSFEKGYQFNALVIDTMEDSWVPLTAEERLERFCYIGDDRNIRARFIDGKEIHFENMKKEQIEEIISKMTLHEKVLLCTGKNSWRTRDYEKLGIPSILVSDGTSGVRFQIGSDQPEEMSFYDSLGGSFDNEEAMSRTYRATCFPSGSAIASSWDTELIGEIGKKLAGECKELGINMLLGPGMNIHRHPLTARNFEYYSEDPVITGEMAAAIVSSVQHEGVGTCMKHFACHNSDSRRTRVNVHVSERALREIYLAGYERVVRKAHPVSLMTAYNKINGEEVSGDNRITRDILKDEWGFDGTVVCDWGAVKDPVEASKGRIDLQMPLSKSSAAYLEQAVETGQLDEKLVNERVARILKLVFQLKEWEAGWDTVKHEDSHWLAVEAAAESMVLVKNENQILPLKPQKGEKIAVLGHMAKEPKYQGTGCAAVHARKVDIPYEQMIPYLTECEVKFAEGYQADGTTTDELIREAVQTAKEANQVLLFVGSFLPGEDDDYNRKDIKLSEGMTRLIDAVSAVNKNCIVILSSGEVCEMPWRHQVSAVLLTWFSGEGMGSAIADILFGKVSPSGRLANTVPERLQDTPAYLSFDGNVYEIPYAEDIYVGYRYYEKKGIQPAYPFGYGLSYTSFEYEHLAVSEENDHTIVTVDVTNTGAVAAKHVVELFIEPKMKTRLPRPVRELKAFKKIFLQPGEKKQVCFSLERRDFAYYDPKVKDWVIENGAYAIEICHDSMNVAVSAEITKSGEKYLVPLGYDCGFYEMFQYPEVKKMFYEFLVEQGLVTADQVNDNLEKGIIWSFWAVRSYLDMNSNGLISFEAYNRFIDRANEVIKKMKAKMKKMKKAAALMMTVAMMLSMAACGNSGAKETTGAAEGSDTQVASQAADGEEKTIYIYQMKTEIQDALEKVCEVYSESHPGVKFVCESASDNYATSLKTKFSGGDAPDIFSIQGYSDALVWQSQLADLTGEPFTSEMIDTSAENVTLDGKVVAFPLSVEAAGYVYNTALFEQAGITKVPTTKEELAEDVQKLADAGVSAPISETYMDWYQLGNFMINLGFAGQEDPKAFIDGLSDGSASFVGNKVFEELADFITFEYALDTNPSTTDFNTQTSLVGSGDMAITIGGNWSQPTYDAINPDLPVSLMGIPYSSDEKENDQLYLVGTYWGVNKDSENLDTVKDFINWLVTSDEGKECMTKTLQLIPAYNNMEADADSIGTLGKAVSDYMAAGKVDNIYYTFYPDGFAQAAGEAVQKLGAGKSTNEEFLQELQDAWDNLSKMNKRAKKQKAIIFVIVLILALIFVYPLFLIVMNSVKPLAQILTKPLSWPDVFQTENYVKAFKEVNVLHVMKNTAVLTIGSVAGITLLAAMTAYWTFRYQTKYSKVFETFVILSMLIPFASLMLPLVQVMKVLGLNNSMFGTILTYWGIGLAFAFFMMQSAVKGLPVELEESARIDGCSRTRIFFSIIIPLLKPTIVSVVLMDMFWIWNDFMVPLIMMNNERLMTIQLSISRLFGQYASKWDIALPALVMTILPIVIVFILLQKKIMDGVIAGAVKGMNRKKSFNSPALWEHLLFLGPASIVFLIVIIIPFIISVGYSFTDWNGVSSNISFIGIKNFIDIFTGKSNFLGAFKFTFIIAICNVVCMNIAGIAIAALLTTKIPLQSAFRVVFYLPNIIGGLILGFVWQFIFINGVPAIGKLLHFGPLMTSWLGTEMTAYAAIVIVSVWQGMGYVMVIMIAALTGISSELVEAAKIDGANAFQIFFKIKLPLCMPYITLCLFWTISQAFKMFDLNYSLTKGGPYGSTVSLALNIYNDAFANNKYGLATAESFVFFVIILVITSVQMYFSRKKEEELMMDYFHETIKVPEQFLAWVYLQSENCITDVKKHWHRSLEISYIIKGSCLFEINGHELEAHPHDILLINSCDIHGCHTNYHSESEMLSIIFPYSFLMAVFPTFNNYRYIVEPSSDAYNKLESAFAEIYPIFRNRSQLPLYQLKLNSFFYEILYILFSECKAPKLVPHSIKSQKHIERCTEIIDYIDNHYMEPLSLEMLADVFSLSKEHLSRTFKTYMDTTFKKYLTSIRVHHAYQDLMDTDLSILQIALDNGFSDARAFSSTFYSYYGETPLKYRKNSKESDISHQKRAYLRTHGFLMKRASSPLFTRPKPCFSYQEDIRKCLDAGMNIHLSKPIEIKKPLQQYFMRMNINHATKAGVTVHEYKVLEKRDPAIDKEFNRITNEWLEVKKSGMLQFTMGTVGLENPMDKRYFYALNSDGKMVAFIVFVPFLGKNGYMADVTRHGKDAPGGVMETIIYQAFQVFKEEGIGYGSLGVAPLAGLDTESKNPMERLLRFIYDHLNDCYGYRDLYQAKKKYSPTERPTEWVPSYYAYLPKYPTPNMLFAAVEIQNPHGIRGYIMIILKGELKRLKKMAITRMTVIKASSDADYRKGQDIFLIDKRIKNFETDINTLTGTPMITATVLDADGSEHETQVSIDEDESQIVGSLCSCSDFYQSEGLCCHCVAILLKYISRRHIQISFPAKKQNRIGQTLIESYIHQSSGTHYPAEASETKVLIELEPILHKQYHKLSVDFKIGTGKKYVIKDLLEFARLIRQGELFQYGKNLKFFHEPEAFTTESRSMLAFIMQRIEEYEYHFHCVQDSTYRFQTMKALRYLPLSPTAVDMFLNMMIGHTLQFDLDDHIRPIYVTDGNPELTLELKAEDSDTYHLTIEDCLILSGAQTFWILKDKILYRCSEAFKKDMQPYLTELNRQKIREITLSEKQLRPFYGSVLKHLEAHTDFHTEGVDLTDYEPPEAHFSIYLDNPAENIISCTAYARYGEETFSLATPISCEDGFRDASMENRILTAIQTYFQPAAVSGNEDSPVADADFIISHDDQAAFLFLEQGLPHFYKLAEVFISSNMKRIRILSAPRTAVGVSVSNGLLEIDIHSDSLPYEELAGILNSYRRRQKYYKLKSGEFLKLENNSLSVLSELADGLRLSEQAIRGGRISVPLYRASYIDAVLTSHNSDIQSHRDRYFKSLIRDMKSVADSDYEVPDAMKPILRDYQKTGYRWLCTIAQLGFGGILADDMGLGKTLQIITLLEHARLEAISKTVDLTDTASHTACPPPVSLIVCPSSLVYNWDSEIEHFAPNLKTLLITGTAQERQELLTHYADYDVLITSYDMLKRDIASYDNLHFHYQIIDEAQYIKNHRTQAARSVCSIHSVTRFALTGTPIENRLSELWSIFEYLMPGFLYPYAYFRSELEQPIVENKDQIAATRLQQLVRPFIMRRLKTDVLKELPDKLEHAVYAQMTDEQNKLYTANTLKLQKDLEQQSDSMFKTSKIQILAELTKLRQLCCDPSLIYQNYHGGSAKLDTCIQLIENAMAGGHKILLFSQFTSMLDVIERRLKSERILYYRLDGSTKSEQRTRLVNAFNENKIPVFLISLKAGGTGLNLTGADIVIHYDPWWNAAAQNQATDRAHRIGQTHTVTVYKLIARHTIEEKILELQENKKALSDQILSEEGVTASQLTKEELLKLLQNMNELKWAVLGTGVIANEMAQALHNMGRTLYGVCNRTNDKAVSFAKKYHVEKVYTSYNEMYEDSSVDVIYITTPHNTHYEFIRQSLLHGKHVLAEKSITLNSSELNKLKALADEKGLVLAEAMTIWHMPLYKKLWQIVESGQIGRPQMITMNFGSFKDYDMTNRFFNISLAGGAMLDIGVYALSIVRSFMCESPDQILSQMKPAPTGCDEQASILLMNPSGQMATVALSMHSKQPKRAMISCEKAYIEIMEYPRADHAVIVDAETGKQTIIEAGRTSNALQYELEDMETAILTGNTAIMKLRESSDVMDIMTKLRSDWGLFYPEEIHSMNKLKRYIIFLIGLFINSLGVSLITKANLGTSPISSIPYVLSLNFPLTLGNFTIIFSLLLIFLQLLILRKNFKPEYYLQIPVSILFGYFIDFTMILLAFVQPESYPSKIIFLLIGCVILGFGVYIEVLADVVMLPGESFVRAIVQTWNREFGSTKVCFDVSMAVIAAVLSFVLAHRLDGVREGTVIAALLVGFIARQFGKALAFVKPLLFPEDYAKSAEEESSGKNAKTTANSSEYASVITIGRQYGSGGSELGQILSDKLGYNFYDKEIIEMTAGTTGYSSNYVGEHQESLTNSLLYDLVNHMYTFPETESPKDKIFDAQSKVIREIAAKGHCVIVGRCADQILKDRTDCLNVFLHAPLTNRIKRVMSKKNLTEKEAKNLILKEERRRADNYHYYTRQIWGASANYHLSLDTALGYDYVMDVILGTAKRLKMSPLSFHYLSMAVHSMIQKNFMEQVKSSGLTSGQPKVLDYLRDHNGANQKEIAAACHIEPGSLTSVLNRMEEKGLIERCMLDGNRRTFYIFMTDEGSRLKDLVENNFASIEKKAFRNISSEEQAAFMETFSKIYENLMNKGDTTPMSQSYEIDMCHGPLFGKIIRFSIPLMLSGILQLLFNAADIIVVGRFVGSTALAAVGSTSSLINLLINLFIGFSVGANVLVARFHGAGRDDEVNETVHTAITLSMISGIFLLILGVTVTRTLLIWMGSPDDVLDQSSLYLKIYFLAMPATLLYNFGSSILRAVGDTKRPLFYLVTAGIINVFFNLFFVIVCHLGVAGVGLATVIAEYISAALIIRCLMRSQGCCHLDLHQLGIVKGKLRQIMQIGLPAGMQGVVFSLSNVLIQSSINSFGSTAMAGNTASMNIENFIYISMNTFQQTAMSFTSQNYGAGEEKRIHKVLFICQGLVISVGLIFGVGAWLAGDTLLSIYSSDPNVIQFGKDRMAVICTAYFLCGIMDTMVGALRGVGYSLMPMIVSLIGACGLRIVWIFTAFQIHRSLWMLYISYPITWIITGGVHILCYILVRRKQLQTVKNRMNFGILVLLIAIILFALLAFKQLSALILAPVVTIFVLICSGIPIMEGLQDMFMPAAADYVSKYFLTFFVGALFGAVYQFTGAAESIARFIGGLCHGKFVAPIIMCITGILTFGGVSGFVVFFVIYPIALNLFKESNLTRRLIPAAISAGCWTWSMSAPGSPSIQNVIAIKSLGTLSTAAFVPSLIVSIIEFLLIFVWLEYRARKFTKNGYYFDDARLKTQLSAEDLNIQGREDLPHWVIAFIPIILILVLFNGFHLDVVPSVFSGVALAAILMFKFVKGGIEQWVKVFNKGAADSGVAILNTAIVVGFGGVVKNTQGFADLVTALKGMSMPPLVFVMITVAICAGACGSASGGMGVAFNALTDTYLALGAKLPYIHRIATIAAGTLDTLPHQGAQITLLGICKLTHKEAYFDIAITQIIIPFITCGLFIVLAQMGLMKVYEGAILTCDANDQVARYLVEDGGRILYVGDELPERYISVRHERLGKKALIPAFTDSHIHFASFSTFHAGLNVMNADSNEEILSMLSDFAKKSDQKMLIGFGASPYSVKERRLVNRNELDRVCPDKPVFMGKYDGHACVVNTKLYEQVKDKVSGLRGCHADTGEMNQEAFFAISDYVTNSISVPQLLKNMQKAIDYMASKGIGMIHTVSGVGFVRDLDVDLERWFGRGLNNGMQMRVFFQTMDVKKVQKRHLPRVGGCFATALDGCFGSKDAALRVPYENSDSKGVLYYSDAQVAEFCKKANRAGLQIEMHAIGDAAFDQATRALKAALDDYPREDHRHAIIHACLPTKEGIDICEKYHILLPVQSAFIDWPQEPDEYLEDILGERSQRLNPLRTFTEHGIMMSAGSDGPCTDPDPIEWMYRACNHSVPEESLTVQEALKMCTYNGYYTTFDEKERGSLETGKIADMVILSENPYEKDVKNLRDIQVKQLLLQGRPYKPLKGSAISQVLKGMRSRSKIMDNLTLKVIARIYTDFGEKFGVPRQSGLVPELTGKIIFEPEYRVPEALSGIEGYSWLWLLWGFSESPRNKWSPTVRPPRLGGNKKAGVFATRSPFRPNPVGMSSVKIEDIQLQTDEGPVIIVSGIDMMNGTPIYDIKPYLPHVDCHPEALGGFSGQFKDYRLKVTCASEFLMLFPSDKREALLGVLAQDPRPAYQNDPERVYGVNFAGRNVQFKVDGDRMTVCSVDGCTIMEYVYPDYYRQFTCIGGECPDTCCAGWEIVIDDKTLEKYKKYPGGFGNRLRNSINFKRKSFKQYDRRCAFLNEENLCDIYTEAGEKLFCKTCRQYPRHEEEYENVRELSLSLSCPEAARMILSQDRLNLIYDEKKGHSEDYGDFDELLFSQLLDGRDAFWKLIENENVPMAVRMIQMLSMGHHLQRNINAGQLFGLENIYDHYLSEGAADRMCAYLKERWENPGSRYHVMKEMFACLHKLEVLSADWPKKVRHYEKVLFGGGRKQYEALHQYRMPDKIAEQLLSYFIYVYFAGAVYDGMPYSKVKLAVISTMLIEDMVCAKAAEKGQLSFEAIADAAHSYAREVEHSDLNLQRLSIMFRHRKCFHIGRLCGALLEWMNHEQMQMEFVRKLPIPQEIKKQFPISEKIAQHKAERDEAIRRVFTGESDKFLLIIGPCSADSEEPVMEYIHRLARVQEKVADKIIMIPRIYTNKPRTTGKGYKGMLHQPDPEKQPDLLEGLIAIRKLHARAIEETGLTCADEMLYPENHRYLSDLLSYVAVGARSVEDQIHRLTGSGVGIPCGMKNPMSGDISVMLNSIEAAQSPQMFVYRGWEVKTPGNPLAHAILRGAVNEHGNNIPNYHFENLSRLYDNYAEKGLENMACIIDTNHSNSSKQYMAQIRIANEVMHSRRHSDDIKKLVKGFMIESYLEDGSQKIGEGVFGKSITDPCLGWEKTEALIYSIAEQLMYKIVSKLLMYGDMPKNSILMQLSDIFKQMDQDTQSRDELVTRIFTQVKHLLQVATDYGFDKNLWHNYLTYLLITDENPFSLTCEKVGANDGSVNFFAKGDFKAFKALFDFDFSEIEERLDIDCFTRLSQYKAIGKKELMYNKNVSEKVQTLSERLEKTANEDEFFDVVTDFYKAYGVGMFGLNKAFRIASRTENHVEFCPINNMDTVMLDDLVGYEIQKKKLVDNTEAFVQGRKANNVLLFGDSGTGKSTSIKAIVNAYYDQGLRMIEIYKHQFRDLSNVIAQIKNRNYRFIIYMDDLSFEEHEIEYKFLKAVIEGGVETKPENILIYATSNRRHLIKETWNDRNDMEYENDLHRSDTMEEKLSLVNRFGVQISYSKPSKKEFNEIVIELARRVGLTMTDEELCAEANKWEMRHGGISGRTAQQFINYLQGTVEIMLYRITDGTLAIGGENLLEHFDFEIKGRERIAITGPNGSGKTTFLRLIAGELFLERDDRRQGEGIYLARNVTIGMLRQQIFENTAHTVQEEMMVLCPSRDTWDRERFEFEQEYDRIFTGFGFAKEDKEKLLSDFSGGEQTKIAMVRLLLEKPDILLLDEPTNHLDMESVRWLENYLQNYSGAVVMVSHDRYFIDETAEIVYELTDKKLVRYVGNYTQFRQQKLKNLAIWKKQYEQQQAELERLNQLIERFKHKPKKAAFARSKKKLIERMEKLPTPPTLAEHIFTGELVPAVMGGKWVAEAEELKIGYDGKAIAELSLRIRRGQKIGIIGPNGAGKTTFLKTVAGLLAPVKGKCQLGLHIEPGYFDQQSAALTSDKKVLEHFHDLFPAMPEKDVRNELAAWLFEGADVQKTVSDLSGGEKARLVLAEILEKRPNFLMLDEPTNHMDIPARETLESAFRVYKGTMLFISHDRYFIEQVADALLIFENGQVSYYPFGYRHYMERLERMNQYRAAGVSEEDAAVVLGQMSAEDQALIAGLKNVPKGATLLGHELSTDQAFLDWQLRLAAEAMADAAEKVENYYHSVKKTKQDEWEKWIEQVYTSEDEISDDNSVKVYMESGQAETDAMENISYTEENNVNAEGQEAEILNKWYKTCLDWYDIWGEIHPYVEEQKDTLIKSAEILSTVHMQTFNIPVGISDFSEIRQNGYYYVDKTGLIAELLNNSAAKVTLITRPRRFGKTLGMSMLAAFFDIHKNSDTLFEGLEISKDTASCQKWMNQYPTLFLTFKDVDGLNFDDAYGQLAAQIADLYKEHAYLLDCPIIDSDDKQIFLELKAGTAGKIHLSRSLVLLMRMMKTYYHKPVILLLDEYDVPLAKASSHGYYTEMLSLIKTLLSTALKDNPNLCFSVITGCLKIAKESIFTGTNNFVSDTISHSRLNEYFGFTENDVNTLLKKAHAEIHASQVKYWYDGYHFGDFDVYCPWDVMNYLRDLQINPQAQPSSYWKNTSDNAIIRSFIDYAGNTITKKLEKLLSGEYILQHIDENLTYDYLHSSEDNLWSILYLTGYLTRADNVQLSAPQTDGVYALKIPNAEIREIFETTVIKWFDDSARTWNRQALFQAVWNTDCSRITDEMTKLLRKTISYHDYLEDYYHAFLAGIFAGAGYIVESNKEHGEGRSDVVVYDTENSRVAVFEAKYSKSLEQMESDCDAALQQIEEKMYAKEYEDEYDHILCYGIAFYKKRCLVKTIMIQKVGNNSMIFEKPPVILAASSVVGEKEGQGPLGQYFDHVEKDPKFGMETWEQAESTMQLMAAEKAIKKAGLSKEQLDFLFAGDLLGQLIATSFGLIELERPVFGVYGACSTIGESLLLASMALCGGAGNYALAVTSSHFAGAEKQFRFPLPYGNQRPLSATWTVVGSGAVIVAAEDKKGRAMAKITGGTPGRIIDFGVKDSMNMGACMAPAACDTICQHLKDFNRQPTDYDAIITGDLGKVGQQILLKLVAEHGYDISDRHLDCGMLIFDPESQDTHAGGSGCGCSAVTLAAYLLPKINRGEWQRILFVPTGALLSTVSFNEGQSVPGIAHGVVIEKIMNEWIKAFKNHYIWELKAFFSKNLLMKTVRTESTFDNIMDITEDNYVAGLQAKNEKALKFFIEHDGWIVKSIVHKMMAKYQDKQEECMNDIFLAVWKNVDRYTGEKASFRTWLTAVARYQVLSHIRDIRYHDYVSLDDVEPVGDSDVKSRLFDEEEMLEFQKLLEILSEEDRQIFTALFWHEKSYEEVGQEMNMPVDRVYSRVSRGKKKLKKNNRWLGGSIMKNIYDLLNQAEDNEDILSENERMEMSDIEKRRIYNRILLDSEEEQEEQSCDEQKKYQDNEKAMAVICAVGFTAGAAVKEYLYKNTQSDYREKLDSTDSEAAADNTADNVIVDTADNTAENAIDGVDIRMTEVRMQEDSLTFDCTFTFDGDISEMQKEMEQWAITEERNAIGDQLFDNAEVYVDGINVLDDDFNYVISQTEAFVIGQNVSFEENKMHIGFLIYQLTEGEDHTIQFCFNGLNMSDHTLEGSWKYTYEAKADAYEAELEWQDISIEAENQEEKITLNRYALTPNGPKIDATVEEKKGTDSIYEEDGYTKLDFMRIVAWDDLGNYYLMYGRSKDYNIDDSTIPYHQRFTIYDGSNGSLDGQENRDYKLVWDENASTVTFAMEKKTDKWDAETKEFAGADYEFVSEPYTVELVKNMELNQCINYLLTTSQHRVFQEVSKRLEPFDVTPVQYGVLYCLWKGDKTTPKEIAAELKLENSTISGILDRMEKKDLLKRQVSIEDRRYIEVVLTEKGAALEKPVLDTIDTANIDILADIPDEEQQILKKNLRLLAGLEEDMNNLLMEVENEVAVVTINRPKSLNALNSETLAELDQCFGEIAERKDIRVVILTGSGTKAFVAGADISEMVNATPAEGRKMGLLAKEAFLKLETMPQVTIAAVNGYALGGGCEISMACDIRVASDNAKFGQPETGLGILPGFGGTQRLPRLVGKGRAKELIFTCDQIDAQEAYRIGLANKVVPQEELLDTCKAMAKKIMSKGSYAVSLAKQAINTGMDTDLASGLTLEANLFGLSFSTDDKKEGMTAFLEKRKANLTDFMNIHILVLVIAIALFGVLAFKQMSALILAPLVTIFVILCSGLPVLESLKGLFMPAATDYVTKYFLTFFVGALFGAVYQYTGAAESIARAIAGLCHGKYVAPIIMCITGILTFGGVSGFVVFFVIYPIALNLFKEGNLTRRLIPAAISAGCWTWSMSAPGSPSIQNVIAMDSLGTPSTAAFVPSLITAIVMFALIFVWLEVRARSFTKKGIVFDDPTLKFQLTAEELPNPDEEKDLPNVIVAILPIILILVMFNNPMHPFPVETSVFAGVALATILMFKRIKGVNEWIGVFNKGAADSGVAILNTAIVVGFGGVVQNTQGFNDLVTALKNMSMQPLVFVMITVAICAGACGSASGGMGVAFNALKDTYLQMGVSLPYVHRIAAIAAGTLDTLPHQGAQITLLGICKLTHKEAYWDIAVTQIFIPFICCGVFILLAQLGLMRQLSYTIEPEADGLSVNAYARNIAGLSRAFLRSVKFRENGILINGQRVTTRGVLHAGDSLVFNMPNDRTQKVVPAEGPVSIVFENEDIVLVNKPAGLVIHPCHGHYSDTLLSYLAWYYRLLPEQPLLCPIGRLDKDTSGLILIAKNKYAAQQLERQRANHTLSRVYLALAEGHWTNQSKSGLIDRPIEKVPECFNRYQVADTGRPSRTEYEVLSEFTYEETPFSLVRLKLQTGRTHQIRVHMASLSHPLLGDSIYGHEGFLGFDRAALHSFEITCQLPGHQDLAVFSSEMPEDFQKMIAKSINFSSTLIMYCCQSRAAGAACMNKRLRISFRDNEGCTLLIAFESKMWYDMATPHNRAANGEIAKTVLMPGDPLRAKWIAETYLADVQLVSDVRNVYCYTGQYKGVTVSVMASGMGMPSIGIYSYELYKFYDVENIIRIGSAGAYTDKLKVLDVVLADAVWSESTYGQAQSLDMKNWQYPSEELNRQIKDTALKMNKKLVSGPIHSSDVFYHEADANDVLRKMVDEEGLLCVEMESFALFHNAEVLGRNAACLLTISDSLVTGEELDADARATAFAEMVELALEAAIAVMTVREKLAALREKMTAYKMDMYLIGSEDFHGSEYVGEHFKCRAFISGFTGSAGTILVTQDFAGLWTDGRYFLQAEAQLADTGIELFKMGNEGVPTIEDYIVSHIEKGQCLGFDGRTVNARNGQDYVRRLSEKGASVNGRYDLVDEIWTERPALSADPAWLLDIAYAGQSREDRIALIRQEMAEKKADWFVLTSLDDIAWLLNFRGNDVQDNPVVLAYLMMSADSLRLYTNAADFKEADRKTLENAGVEFFEYNGIYEDVAKLTENQTVIYDGSALNYAILERMPESAKKVDEQNLTLLPKAIKNPVEVANIRQAHIKDGIALTKFMYWLKKNIGKVPMTEISAAEKMESFRKEQEGYLEPSFEPISGYAEHGAIVHYSATPETDAKLAPKGLLLMDTGGQYLEGTTDITRTFVLGELTEEEKKFFTLVLRGNLNLAGARFLHGCKGYNLDYLAREPLWQIGMDYNHGTGHGVGYLLNVHESPNGFRWKMLPNRNEGCILEEGMLTSDEPGVYLTDKFGVRHENLMVCMKGEKNEYGQFMYFDTVTLVPFDLDGVDPLLMTERERQLLNDYHQKIYEVIGPHLNEEEQAWLKEATRAIMQRIYLNDNWYFARNYTEDLLNPEADLSELRKVRIPHTVCELSYSNFDEMSVQQLCGYRRSLIVEDAWRGGHLILTFEGAAHEAAVYVNGKLAMKHYGGYTAFSVDIVPFLADGREQVITVRLDSREKLNQPPFGSVTESLTYGGIYRDVYLDVKDEYYIEDIYTATPDVRTDEKILKAQIKLNAYTEGLRLAAHLDTWTEIPLEGEDLQHWDLKTADVHFRTSCLTYTVPEAMLWDVDMPILYVLTVELLKDGQCVDTKKVRVGFREAVFDGEGFWLNGRILKLCGFSRYQSWPYVGYAMPKSPQQLDADLLKFELGANAVRTMQGPQSQYFMDRCDEIGLLVIPEIPGWQFIGDTRWKKIAVRNVREMVMQYRNHPSVILWDTRISDSDDEDALYYKTSRLARELDVYRQTGGERDFAGSHFYEDVYLYDDMSEDAASAFISSENIIQDLSKTCLLSGHRSLNVQVNGGAGIDDWLCQTMRQASVWRAVESNDSFAGSLAPVMTDYPVSRKYSGSDGICSRGLMDAFRNPKMAAAFFKSQREDEPVCAAVLPMDDRLMVMTNADHILLYCDEKLIGEFYPDETVFRDLVHPPIFVEHLSEIVRTGEKPKEQKQKGTSNRVFLKKESEKDQELFVQQKSELAFSRRYAVTWRIEAIKDDTVVAGTSITPTPEVRLQITTDRQHMMEESSYDAATVHIEAVGESVQHLYGYETPLVLKTEGDIELIGPSVIVMKNGFAGTYVRSIGKAGSGRLMIQDGHGEAVVEFSVEVMNIYFANYDRNGMTAVEESKYQHAVGRQLLKTALLRAGVSKDFLSKEESLIFAYGPSGKPLFHDLPDVHFNISHTGGLVVCAVGNIPIGIDAERIRPYPKSVLRKMTDRERLYIQKSDRQDEAFMRVWTMKEAMIKLTGDGLAAFERTECVPGEVLHMYSKRTVCDEAAVSGALSDIYCRQLVWQGQYVITAVENTNKNQDCIFSKKVYNRLMEFNFASRLDSFEEGIFATLNDKKNELVKAGRKVYNMSVGTPDFKPAQHIMDAVSEAASKPENYKYALADLPELLDAVSNHYAERYGVKGIRHEEIMSIYGSQEGMAHIAMAICDPGDVVLVPNPGYPVFTAGPFLCGAKVETYDLHPENNFLIEFDKIPEEQARRAKMMIVSYPLNPVCVTAPDSFYEELITFAKKYNIIILHDNAYSDIIYGGRVGKSFLSFRGARDVGVEFYSLSKSYNYTGARMSFVVGNQAVIDKFKNVRSQIDYGIFLPVQYGAIAALTGPQDAVKAQCEEYDRRNHALSEGLTSIGWKVPLSQGTMFSWAQIPEGFANSNEFVMELMEKTGLIVTPGSSFGSLGEGFVRFALVLDVPTIQEAVRSVKESGILNSRMMYDELSEADIQKMKEEIEHRKVVVRKEALVAVKEAREQGDLSENFEYQAAKREKNRNESRIRYLERMVKTAKVIKDHSKDDEVGLNNTVTVYFEDEDEEETYRIVTTVREDVLHGLISIDSPVGKALLGHRVGDTVHVQVNDKYGYDVEIRKIDKTTDETDDKIRDFMLVDYLRVFITGGVICALVQLLMEKTKMMPGRIMVLLVCSGAILGMLGIYKPIVDFGQAGATVPLLGFGYNLWKGVKEAVDNQGFFGLFTGGFTASAVGISGSLVFAFLASLVCNSKIKKMDYSKQNNEKKRKKIRSNAAKSKKKITFNIFRFTMLAILLIVIVGIAAAIGGFKGVIDSAPDITASNVMPSKLKSVMYYPDGQEAIELVGAQSNRTIVSIEDIPKCLSNAFVAIEDNRFYEHNGIDPKGIVRALFVGLSHGGNFSEGASTITQQLIKLTVFNGGAETDTMQRFKRKFQEWYLALKLEKEMSKDEIMEAYLNTINLGRGAYGVEAAAERYFNKKCSDLTVSESAVIAAIAQSPSYNNPIDYPDINAQRRDKILNNMLTLGLITQQQYDEAKADDVYSRITEVNETTKSKDIIYTWFEDAAIDQVLNDLQEKLGYTSAEANNALYSGGLQIYLTQSRHIQDIVDSYYNDDDNFPSTEYRLHWALTYKDKDGETVNIDENSLQSYYGADDCDLLYDNEDQAKQSIAEFLEAKGITDDDIIAQSFDMTVQVQSSFVLMDQSTGYVLALSGGRGEKKTSRSFNRATQSTRQPGSVFKTIAVFLPALDSCGLSLASTKEDEPYTTPDGYQPFNTNANSYQGTTTIREAITYSMNVVTTKWLVEDVTPKLGIEYLENLGITTMDEDRDAYAPLGLGGISNGVTNLELTGAYAAIANGGVYTEPILYSKILDKDGNVLLDNVPEKHTAMKDSTAWLLTSAMEDVVSKGTGTSAQISNYGIAEAGKTGTTDDYKDLWFVGYTPYYTAGIWFGYDDSTLMRYRLGRNYNAHKVLWKNIMNEVLEGYEDRDFVMPSDVEKLRVCSSTGLLASYGCNAITEYFAKDTAPTEYCSKHSYRYYENSYDDDSSSSSSSGSNGSNTTSGDNSGNGNSGADNSGGDNSGGGNSGGDNSGGENSGGENSGGDNSGGDNSGGDNSGGDNSGGDNSGGDNTGAEQMAEINKVNNYKTVYRGGTAEIVEKKSRFIAHSAHVESEEEALAFIEQIKKQYWDARHNCHAFSVGVTNETARCSDDGEPAQTAGKPMLDVLMGQQLKNTVVVVTRYFGGTLLGTGGLVRAYSAAVQEGLKESLIIEKFLCRRVRMSMDYTMLGKMQYLAAKLNLMILDTLYTEGVEMQLLVPDTQYAAFIKEVTEASNGKVVPESEGLCYGADVEGKIEIFDAMKKSLKLGAACLGVALLLCACGKGSANSTDTAAGSETESAAQSASESASETETETEDTNAYAYDYDVESLVKLGDYKGLTYTETDTSVSDEEVESQINSTLTAHATPEQIKDRAVEDGDTVNIDYEGKIDGETFEGGTASGASLTIGSDSFIDGFEDGLIGVKPGEKKTLNLKFPDDYKTNPDLSGKAVDFDVTVNYIEGDDIVPELTDDFVKGLSITDVSTVDEYRAYVKSQLQTNKESEAESSKQKELLQQAVDNAEIKEIPEELVTEYSAQYTSYYQQYASYFGMEFSDFLTQYMNQTEDDFNKDAADYGKQVAGNMLVVCAIAKAEKIDPDALYDEKVAQYAKQSGYSDVATLEKDYSQKYLRQVIINEEVLNVLEENAVAVAPTETESEASKMDFMSVFLPVLILGVVIVAVLVVVATVASAVSAAAVEDDEEDEMNANDEGMYVFEQHPRIFCVILGVSGKQSGVSRNQSGNGKSGPFWIRFPGVCFSHQLQSANAAWGGMTNNSSSTMEVPQAKDAMDKFKMEVASEIGVNLKQGYNGDLTSAQAGSIGGEMVRRMIKRQEEQMANGGMQMEIERKFLIQKMPEHPEQYKSHLIEQAYLNVRPVVRVRREDENYYMTYKGGGMMAREEYNLPLDADSYAHLLQKADGNIITKRRYLIPFHAYTIELDVFEGLFEGIVVAEVEFPSIEEAESFAAPEWFGEDVTYDGRYHNSAMSRMKVEEIVEIQSLLASEGKMNTKNKAIVCILISAFGFSIMNLCVKLSGDLPSIEKSFFRNLVAAIIAFILLYRSKAGFSCKKENLPALILRAVLGTIGIFCNFYALSHMVLSDASMLNKLSPFFTLIFSYIFLKEKLSPFQCIAIVIAFIGSLFIIKPSFDLTATFPALCGFIGGVCAGGAYTCVRYLGIKGEKGPFIVFFFSAFSCLAALPYIIFSFEPMTLQQFLILIGAGAGAAVGQFGITAAYKYAPAREISIYDYTLVIFAAIWSFLFFGELPDWISIIGYVLIFGMSALMFFYNNRHAESAKMGSYLNPGNFSFRGSLRSKIYVDKSKLIAKTNEVLCTEQKYICVSRPRRFGKSMAANMLAAYYDRSENTEDLFQNLAISREKSYEENLNQYDVIKINMQEFLSMAGTIEKMLEMLKDYLVVDFEEAYPEVRFRDKNNLIQTMKDVFSYTKCPFVILIDEWDCLFREYKQDKEAQKKYLDFLRAWLKDKDYIAMAYMTGILPIKKYGSHSALNMFTEYSMTDPGELAEYFGFTEPEVSAICEKYGMSFEEAKTWYDGYQLVAHRQWKDECYSMYNPKSVVEAMLRHKFGTYWNQTETYEALKIYIQMDMDGLKASVIRMLAGDSVPINTGTFSNDMTTFATKDDVLTLLVHLGYLTYNSIDGTVSIPNKEVSQEYINAISTMNWHGVADSVEASRKLLEALWQMDADAVAAGIEKAHEEISILQYNDENSLSCTIHLAFYFAREYYTMIRELPAGKGFADVCMIPRKRYADKPAIVIELKWDKSAAGALEQIKGKNYGNALKDYQGNLLLVGVNYDKKAKKHECVIENVKKMSVQVEKLEHNMAKLTITVPAETFNKAITQAYKKMKNQISIPGFRKGKVPQAMVEKMYGAGMFYEDAANIVIPEEYDKALAEVKDIKITSQPAIDVTQMEKGKDFIFTAEVATKPEVTLGQYKGIEVPENKVEVTDEEIEAELKKVQEQNAREITVDRPAENGDTVVIDFEGSVDGEVFEGGTAENHPLVLGSGSFIPGFEDQLVGATADSDVEVNVTFPEDYQAKDLAGKAAVFKVKVHEIKKKELPEINDEFAQDVSEFDTLDEYKEDVKKGIAEQKEKAVRQEKQEKIIRQIVENAEMDIPDPMVITQTRQMMDQFAQQMQSNGLSMAQYYQFTGLTPDGLLEQMKPQAQKNIENRLVLEAIAAAEGITASEEEVEKEFANIAERYGLTVDKVKEIFADEETENIKSDIAAQKALDMITEAAVEVPVTEVEATVEDAEMSLVPTVIEQSSRGERAFDIYSRLLKDRIIFLGEEVTDVSANLIVSQLLFLESEDPGKDIQMYINSPGGSVSAGMAIYDTMQFIKCDVSTICMGMAASMGAFLLAGGTPGKRLALPHSTIMIHQPSGGAQGQATEIQIVADRIQYTKRMLNELLAANTHQPLEKIAADTERDYYMSAEEAKNYGLIDAVVTKRAMASRIDDKKQPRCSFCNKTQDQVRKLIAGPNAFICDECVDICMEIIEDEMEEDQNDADFNLLKPVEIKNFLDQYVIGQEQAKKVLSVAVYNHYKRIASNAGNDVELQKSNIIMVGPTGSGKTLLAQTLAKILNVPFAIADATALTEAGYVGEDVENILLKLIQAADYDIEKAERGIIYIDEIDKITKKSENVSITRDVSGEGVQQALLKILEGTVASVPPQGGRKHPHQEFLQIDTTNILFICGGAFDGLDKIVESRTGGQSIGFNADIHVKEEEQNVSELMKQALPQDFVKYGLIPEFVGRVPVSVSLDLLDEDALVRVLTEPKSAIIKQYKKLFQLDGVDLEFEDEAVHEIAHRSFMRNTGARGLRSIVENVLMDTMFTLPSDETVEKCIITKAVVDGQAAPELVHGEPQLPSKKGQTKKSSRKNSGEIAMSDINCRMPAVALRGLVCLPDMILHFDVSRKKSIAALEAAMVKDQMVFLVAQKDPDEEDPKQEDLYTAGAMAKVKQIVKMPENMVRVVAEGKFRAELDEMISVSPYLLTDVIIHDREEKVENENEAEAMRRVLEEIVQKFIDAGAKFGPEITRQMEQAEDIVKLTNQLCANMPMRWQDRQTLAEKMDFRERYEELCRIMEKEYDVLLINQDIQNKVKSRLEKNQRDYVLREQMKLIREELGDDMQSEIDEYEKKLEELKAPDVVKEKLEKEISRFKASAGNSAETGVLRTYIDILFEMPWSKTSRDNKNIDKAAKILREDHYGLEKVKERILEFLSVRLLTKKGDSPILCLVGPPGTGKTSIARSIARALNKKYVRISLGGVHDEAEIRGHRRTYIGAMPGRIASGLSHAGVKNPVMLLDEIDKVSTDYKGDTFSALLEVLDSEQNSKFRDNYLELPLDLSDVLFIATANSLSTIPRPLLDRMEIIEINTYTQNEKLHIAKEHLIEKQMKANGIKAKQLTISDKAIEDIILYYTRESGVRGLERCLGDICRKTARMILQDGKKNVKVTEKNLEHFLGTKKYDYEMANAKNEIGIVRGLAWTSVGGDTLSIEVNVMPGKGKFELTGHLGDVMKESAMAAISYIRSVSDQFNIDREFFEKNDIHIHIPEGAVPKDGPSAGVTMATAMLSAITGTPVRADVAMTGEITLRGRVLPIGGLREKSIAAKVAGIHTVIVPEKNRRDIKELDKEITKDLKFVYASTMADILPVALESMPKAQAANSMVIKNVNLETVCGITSTLPENQHPEVAFSGKSNVGKSSLINGLMNRKAYARVSQQPGKTQTINYYNVNDEIYIVDLPGYGFANVSQAVKAKWGKMIENYLRKSRQLRMVFLLVDIRHEPSANDKHMYSWIIENGFYPAIIATKLDKIKRSQVQKQLKMIREGLNVAEGTPIVPYSAVTKQGRDEIWELIETYAMAPEEALNEDEMKLFFSGAAHEVTGSKHYLEAAGKKILIDCGMEQGKNLYENQEIPVPASDVDYVFLTHAHIDHSGMLPLLYNQGFKGSVYTTEATQQLCQIMLLDSAHIQEFEAEWKNRKGKRAGIPPIVPIYTTEDAVGILQYFVPCRYEEKIQVCEGIEIRFVDAGHLLGSASIEVWVTEQGVTKKLVFSGDIGNTNQPIIKNPHYIKDADYVIMESTYGDRSHGPRPDYIKELTAIIQRTFDRGGNVVIPSFAVGRTQEMLYFIRQIKAEGLVKNHDNFEVYVDSPLAVEATNVFNRNVPGYYDDDAMALIKQGINPISFPGLKTAVTSDDSIAINVSTTPKVIISASGMCDAGRIRHHLKHNLWRPECTILFVGYQSVGTLGRNLVEGATEVKLFGETIEVQAEITSLAGVSGHADCEGLMKWIGAFEKKPKRVFVVHGEDTVTDVFAARIKDELGIDAVAPYTGAEYDLLTNECLQAPEPVRVTPKKAMQRKAATVFERLLNAGRRLMLVIRHNEGGTNKDLTRFTNEINNLCDKWDRMDRKEQLMKIFSVHIREILTALPVHIGRLQEIRLRAGRPLMILYDNKEYLAGPEGNIVTESSEAYHVSAQEIQETMTYLSHYSIYAYEEEIRQGFLTIQGGHRVGIAGKVLSDGNGIRSIRPITFLNVRLAHEVRGCADELMPWLYEEGRPCSTLILSPPGCGKTTMLRDVIRQFSNGCGQEAGRRVGVVDERSEIAACYRGIPQNDMGIRTDVLDGCAKHMGMQMMLRSMTPEILAVDEIGSRTDKEAIDAVMNCGCCLLATAHGASMEKMQMRPALRQMAEEKIFERYVILSRKNTVGKVEAILNADMDFLYQNHRGDLCHDRMRRSRTGYGRLLEEALCTAGTDAAVTMLHGEIRYTGAELPEAIDQIALRQEKPFSDFYHGLSEQMRRMDGQSLKTLWQTEIEKCLNNTYLTKEDKQIFLESGSQLGYLDRQMQLSSLEACMAQIEDNQNMIRKNMKEKQKLSIALGLLSGFFIIILLIMTVNVIFKIAAVGILISVLNQILKHSGRDDQAFLTSLAGLILVLMWIIPYIYELFQTIQQLFALMEVIKAAVMGIAAAMLALYMKSVRPEYSSMISISAGIFIFGFALICLQKITGSIQTLGEYLAVSPVYIRILLRITGIAYICDFASCICKDAGYQAIAAQIELLGKLTIVVMSLPVLQTLMSAITEFIGAMERWPKIKMWKYILRKKMLYGIGFVCVLIGMTVTGVCIKPAKEVQASISHEAVKDIRSDAPGEGEGVSEQPEGENTDDKDDPLDMLGDLSEIEAAVSEAMTVRSSVSFKAILKQLMTGSLSEAGQLLFQMIREQVAGGIYENQQLLFKIACFAVIGAIFTNFAMAFSKEQVAETGFYLTYTLLMTLMMTSFMMTSAIVRDVLHSLTEFMKVLLPTFCTALTFTTGSLLSGAYYELMMIAIAAADWLMSSLIMKMIQVYVLTALVNHISKEDYLSKLSELLALLIRWSIRTVVGVILGINILQTMLLPAIDRAKETVAYKLISAVPGVGTAMNTAVGAVIGSGVLIRNVLGMGSLLIILLICAVPVVRVCMVLLSYKIVQAVIQPVTEKRLLEGMDAMTQGVGMLLHVLVSCVLMFILSLAVVCNAAAVVAVMEQLLVWVKKLAVFMILCSYMEHLLPAQYKRYFHMCTGLILILMITSPLRQVLQGNIGSEVSCLLENLRTGSQVYQMKGEDGKRYQAYYMKQYKAAMTEQIRNLADMSGLRAEEIRLSVNEDVSSDSYGCPTEVSMHVLSEDGMEADNGSKKQFRQLLSQQLGMAESQIHFGYSGMADFKAFWQRFKSGENGGKGQKDRFMLLALVGLLILVAVWPVGGKSGKTSGQTEASVEKKQETSYNYTDQYAAVMESRLKSMLESVEGAGEVKVMITLKNNGEQVVEKDRTYSENKTGQGEQSGQTTTNNNISRSESTVYSSSNGGSPYVVKQIEPEIEGVLVAAQGGGDETVVNEITYAVQVLFDVPVHKIKVVKMSSRMKRLFRKNQIIITSLAIMIVIAGYLNFTADQTKPVKQEAAAETAEKIREENIQAEEAAAGAEADITSFPDEDLASVSAEAESTVDTETPEGEKVGEAVLTSSASAGAFSASAKLNREQVRSKNEASLLEIINNTDISEDMKADAIASMNRMTDRAEKELDAELLLEAKGFKDSVVSINDDSVDVIVGAAEITDEQKAQIEDIVTRKTERNVSDIVITTMEMANERENNTNYTIYENGPLGEVQIANEVVAIIAGIAATEVDGVAAMAGDVQKELVSKLGMKVLSKGVRIAFEDSGIRVDLSIILEYGCSIPEVTAAVQERVKNSIETMTGLKVVDVNIRVADVKIDNEMGRRELREHIFRLLFRRDFFPEEEMKEQEAFYIEYLADPEQKEVDYIVQKTEKIMAMIPELDTMVNEHSVGWQTERMGKVDLTIIRLAVYEMKYDDDIPVSVAINEAVELAKRYGSENSPAFINGVLAKMIMDDFALNHIYVRGEVSNCKYHSSGHIYFTLKDRGGAIACVMFAGNRKGLNFRMSEGMAVIVYGSVSVYERDGKYQLYAREIIQEGAGRLYEAYEALKKKLLAEGLFDEEHKQKIPKYPKRLGVVTARTGAAVQDIINVSLRRNPWLQIVFCPAAVQGDGAAQSVVRGIHALEAAGVDVMIVGRGGGSIEDLWAFNEEIVARAVYECSVPVISAVGHETDTTIIDFVSDLRAPTPSAAAELAVPDMRVILGQIQGYEESLSHAMEQAVLRNRQRVENYQRIFRHLNPQSRLNDRRQRLMEIEERLRIGMNRKLDAAKAELAIRTQKLEGVSPLRQLERGYAYVSDEEGHGITSAGQVTKGQLLLLDVRDGRIESEVTAVKKRTSMAKAKSLETAFEELDALAAKMEDRDLPLEEAFKLYQEGVKLLQYCNGAIDKVEKKIIEIHGNEDEEDEMQLEQELKEKTADIEKLLERMLPEEAGLQKTIFSAMRYSLMAGGKRIRPLLIAETYRFFGGTDMALAEPFMAAIEMIHTYSLIHDDLPALDNDDYRRGRLTSHKVYGEAMAILAGDALLNYAFETASKAMDHARDDEELLRVMKAFRILSSKPGINGMIGGQVVDVELTGKPIPEKTLRFIFELKTGALIEAAMMIGAQLAGASDEQIAAVEKAAGDIGMAFQIQDDVLDVIGNEALLGKPVHSDEKNEKTTWVTVYGLEQAKKDVAEYSEEAMAILAQMTGVTEPEKSFLYDFVEYLIHRNKMSGYLDRINEANDIKKIEPEAYDALASEIRSFIIESVSEHGGHLASNLGVVELTMALHLCMDFPNDKLIWDVGHQAYTHKLLTGRKEDFSGLRTFGGMSGFPKHKESPCDAFDTGHSSTSISAALGYARARDLKGEDRTVVAVIGDGSLTGGMAYEALNNVSHLKSNMIIVLNDNKMSISENVGGLSKHLTALRTRESYMDFKMDVEKKLKQIPHVGDSVARSVKKSKDSIRQLFVKGGFFEDFGIKYIGPIDGHDIKEMVRVLNALKRLNEPVVMHVVTQKGRGYVPAEQNPSAFHGVGSFDIATGESLASKSLTYTSVFSKTICRLGKAHPDVVTICAAMPDGTGLTAFKKHFPGRFFDVGIAEQHAVTFAAGLAAGGMHPFVAVYSSFLQRAYDQIIHDVCIQNLPVVFCVDRAGLVGADGETHQGIFDLSYLSMIPNMTVCAPKNKYELYDMLYFAYQYHGPIAIRYPRGSAYEGFKNMRPPIEYGKSELMFEGEKIALVAVGSMVQTAVQVREKLLDKGINATVVNARFVCPLDTECLDRLSRDHQWIVTMEENVLKGGFGEACGDYLLAKHEDVRLIHVGVPDVYVEHGGVDQLKKTLHMDADSIVERICSAMSDADDMKERLDVLLVKRNLAESREKAKAIIMSGNVFVNGNREDKAGTTFDEEKAQIEIKGHTLPYVSRGGLKLEKAIEVFGVDVKGKVCMDIGASTGGFTDCMLQNGADHVYSIDVGRGQLAWKLRQDPRVICMEKTNIRYVTSEQIPEKIDFASVDVSFISLKKVLGPARELLQDDARMVCLIKPQFEAGREKVGKKGVVRDKAVHLEVIEMILQFVTSIHFEILNLDYSPIKGPEGNIEYLVYIRKRPEDYPLGAWTVDPAEVVDRAHEELAKGMKKFALLTNYSKDKRLVYTRMIKTYITENGGSYWIPRYISEPDKDGDQRYDFSDMPEDIECVLVLGGDGTLLQAARELLQRHIPLLGINLGTLGFLTSAEKSELPKCLDSVLDDSCSIDERMMLEGVAYHGSEKIQMNIALNDVIIARAGFSRLVELKIYVNGELLSIYNADGIIVSTPTGSTGYSLSAGGPIIFPQTDVIVITPICPHSLQARSLVVSGEDRIMIEIGRRRKTQKEEAMVTFDGRSAQELETGDRIEIYKAQETTQLIRLKGRSFYQVLQNKIGTAMKLKRHEKIIELVNKYEIETQEELASLLNQAGFRVTQATISRDIRELRLSKVNSHDGKQKYAIMSVKERGLNDKLSKVLKEGYISSMEASDLVVVKTATGMAMAVATALDAMELPGFAGCIAGDDTVMCALHSGADVEMLLNRINKVVNQMLQNIHVKNMALIDEADVDFGGHLNILTGETGAGKSIIIGSISTALGGKVSRDVIRKDAEYALVELNFKVNSPQILAELEKMEIPVDGDEVVISRRITGSRSVARINGELVSLPVLRQAAALLIDIHGQHEHQSLLHKDKHLAILDQFSREEMASVKDALKDSYREYMILKKEMDGAITDEGKRLSEISFLQYQIEEIENANLQDGEEEQLDKAFRKMSHARQMMESVAAAHGMTGYEGSSSAGDLVGRALRELSSVEKYDEAIGGLISMLTDIDGLLNDFNRELADYESGLTFDESVYHETEDRLNLIQRLKTKYGSSIAEILAHQAECQEELEKLDDYENYLSGLRMKLNQAEKELKDLSDKLTTIRRANAAVLQERIKAALIDLNFLDVRFEIHCEPLGHYTENGQDSIEFMISTNPGETVKPLGKVASGGELSRIMLAVKSVLADADAIETLIFDEIDTGISGRTAQKVSEKMAVIARKHQVICITHLPQIAAMADDHYVIEKSAMEQRTITEIYHLSDDASVGEIARLLGGVEITDAVMQNAREMKNLAQSKKMERMRKYRVWLTAALVINLVVLFGFVMNCYQTRKNEVDQKLTKVSADVARLQYVMPVGMPVGLYIHTKGVMVLGTGKVTNLEDDVLEPAKTVFREGDYILSINGTTLRNTSQAMSLIQSCKGKMLSFEVLRDGKKIMLTMKPVETAEDRYKIGVWLRDDTQGIGTITYIDADQNFAALGHGITDVDTGILMDISHGMVYQSNILSIVKGSQGTPGEIVGTIDYQKKNRIGTINDNSSCGIFGTVDRDYLAYDPEKAVPVANPEEVTEGPVQIVCTMNGETNRYAAEIRKIDKNNKDHKNFVLQITDEQLLEKTNGILQGMSGSPVIQNGKLVGAVTHVFVNEPTKGYGIFAENMQNAEEMAQNLILVAIVLFLCLMAEKLSGKVGMPALILFMGVGMLFGSDGILRIAFDDYGLAQNICLIALCFIMFYGGFNMKWSAARPVAVKAICLSTIGVVVTAGLTAVFCLVVLKFDFVDAFLMGAVLSSTDAASVFSVLRTKKLNLKDGTASILEMESGSNDPVAYLLTMIGIMMKTGGSLSSLPYMIFAQVVFGLAIGAAAASLGILLLKKGTMQAAGMDMILVIALVMIAFGLSEAIGGNAFLTVYLMGILLGNSNIRGKETLIPFFDGMTGLAQIVLFFLLGLLSFPHKLPQIFFVSLAIAIVLTVIIRPATVFLIMKPFKCSSRQCLMISWAGLRGAASIVFAIMVIAASSSSSDTLFHTVFMVALLSVAIQGTLLPFVAEKLKMVDDSCDVRMTFNDYKEASEITMMQMEIPEGHNWENRLVKDVSMPTGSLAVMIKRHGETLIPGGDTRILAGDTIVLSVPAYESGGQEHLEEQEITQKHRWCNKTIAELMLPHGTLIVLVRRDNENIIPNGQTEILEGDHVVIYRMIKNIVFDMGNVLVAYDGRKVCKHYIKDKKDRKRVFTAIFQSPEWVYLDMGMIPEEQAVDQMCARLPKRLHEAARLCMRDWHLYNMKPIKAMIPVIQDLKACGFKLYICSNASLRLPMCYQELLPEVDSFDGILFSAEEKLLKPQKEIYERLFEKFDIKPEECYFIDDLQLNIDGAAACGMKGYCFADGNVEKLQKALESLNKDSMVSSNGVSAENKIWNSKRDIQSQVLQHWPVLRCCSLASYVPLPNAGSVNVPVMNVSFEFHLIYRDDTPMNIMTLYDELVARGLIAQVTDEEEIKELINNGKATFYIGFDPTADSLHVGHFMALCLMKRLQMAGNRPIALIGGGTAMIGDPSGRTDMRQMMTPETIQHNVDCFKKQMSRFIDFSDGKALMVNNADWLMNLNYIELLRDVGAHFSVNRMLTAECYKQRMERGLSFLEFNYMIMQSYDFYELFQRYGCNLQFGGDDQWSNMLGGTELIRRKLGKNASAMTITLLLNSEGKKMGKTQSGAVWLDPNKTSPFDFYQYWRNVGDADVLKCLRMLTFLPLEQIDEMDKWEGSQLNQAKEILAFELTKLVHGEEEATKAQESARALFSAGSAADMPTTTLTEADLRDGSVDILGILVATGLCPTRSEARRNVQQGGVTVNGEKVTDFKAAYTPEDIMKEDFVVRRGKKKYSKIVFEMFKIDRTLAAQVVNTVKDVCGRDVNFINQYGIIFASTDPERVGTFHEIGHQAALTGETIEVRADDNFHGTRMGINLPVYYNQTFMAVIGITGQPDEVRKYAHLAERITHLLIRERELNTISRNQADKRHFAMDALIHQASANMDYLNACLKECGINITQKYRILLIRAAAESPSDNLSLLEQKIHQFFEMLSIRLYTFYYPNEYTAVVLPSQLEHNAYILERFAKDHQTSLKMTVGKMTSVYQLCDSYQTAVTAMKHFTAQTEGYIFFDDLGLELILSGLNPLEKAEFLTKTLSTLDENERHLLTAYFENDMSLSGTSRQLFIHKNTLQYKLNHIFRKSGLNPRAFKDAVMLYLGLNLAKMRAVIAIDSLKGSLSSIEAGQAIAEGIRKADAKADVVIRPLADGGEGTVEALVCGMNGTLQHVKVTGPLGEPVVCEYGIIAETKAAVIEMSGAAGITLVPDAKKNPLYTTTYGVGEVIRDAIEKGCRRFIVGIGGSATNDGGIGMLQALGYGFLNKDGQQVPFGAIGLKELETITDTYVLPELAECEFKIACDVTNPLCGENGCSAVYGPQKGANPSMIMEMDKWLRYYAALAREKFPKANPNEPGTGAAGGLGFAFLTFTNAVLESGIKIVLEETKLESYVKGADVVVTGEGRLDFQTAMGKAPVGVAGLAKKFDIPVLAFAGSVTKDATECNKNGIDAFFPILRGISTLEEAMKPENAKQNLTDTAEQAFRLFNICRQAMEKTVLVVIPAEERHKEKLERAGKGCRFVYASPQTATEEMIEAADVIIGNVKPDRLHAPERLQWLQLNSAGADAYVKPGILRSTTMLTSATGAYGKAVAEHSFAMLLMLQKKLNLYRDAQTKNEWSDFGTVTSITDVTVLVVGLGDIGLHFARLASALGARVIGLKRSMGPCPEGVHELHTMDELDNLLPKVDVVASFVPSTATTYHMYTKERLMTMKDTAIFLNSGRGDAVASEVLYEALSKGWIASAGIDVTEPEPLPADSPLWQLPNLMMTPHISGQFHLPETFERIVDIAAANLEAYLKGENLRNRIMGNVNMCKAIQEMIQDGRDEGRVQLLVTLIQSGDISLQRAAALMNMTPEEFQEKSKMISMTTPNIYRSRILNEISESDVGKTIRVAGWVENIRDHGGVSFIDLRDMYGVLQVVLRDTSLLDGITKENCISIEGVIDHRDEETYNPKIPTGTIELEAHSIDMLGKVYHQLPFEIMTSKEIREDVRLKYRYLDLRNQKVKDNIIFRSQVISFLRQKMTEMGFLEIQTPILCASSPEGARDYIVPSRKFKGRFYALPQAPQQYKQLLMVSGFDKYFQIAPCFRDEDARADRSPGEFYQLDFEMSFATQEEVFRVGEEVLTATFEKFAPEGASVTAAPYPVISYKDAMLQFGSDKPDLRNPLRIMDVTEFFQRCTFKPFLKRTVRAIRVHADMSKGFHEKLLKFATSIGMGGLGYLEVMEDKSYKGPIDKFIPDDMKQEFAELTGLEVGDTIFFIADKEERANLFAGQLRNELGERLDLIEKNAFRFCFVNDFPMYEYNKDEKKMDFTHNPFSMPQGGLEALNTMNPEDILAYQYDIVCNGVELSSGAVRNHDLDIMVKAFEIAGYSEEDLKTKFGALYNAFQFGAPPHAGMAPGIDRMIMLLRNEDNIREVIAFPMNGNAQDLMCGAPGIVTETQLREAHIKVRDMRRQLDVRQQEVFASVERLHCSNSGGTADFIFVLNDHRSGRFFIFREMQKENKGSIDLTRGSIPGGILAFAIPLFLGQLLQQLYNMVDAWVIGNFADNDAFAAVSSTGTVVFLIIGFFSGIATGGGVVISRYFGARDEDNVSKAVHTNFLMGLIASAIGTVAGLILAPHLLVWLGTPDSVMPHALRYLQIYFGGVSTVILYNICMSIMRALGDSIHPLYYLLFSSIVNIGLDLLFVAHPAFHWGVTGAAAATVISQGLSVILCLFRMCRIKDYTRLDFKKLHYHSHMMKKVLYQGLPAGIQNAVITVGNLVIQKNINSFGAYAMSGMGAYSKIEGFVFLPIMSMAMALPTFVSQNLGARQYHRAKKGAVFGILFGMITAEVTGLLIYFFIPYALKIFGSTQEAVAYGTIHAHIVSLFFFLLAFSHCSAGVMRGCGYAVVPMAGMLLFWCGLRIVYVTTALRFFPVFQMISWAYPLTWGCSTILFLIFLFKADWQHHLDMTKINVAIVDDNEKMVSLLDAILQTDKNIEVIGRGDDGVQALDIIKNQEPDVVLLDLIMPKLDGLEVMQQVNKDMSLKKRPAFIVISAIGKENITENAFNLGAMYYIMKPFENDMILRRIHQVTERQILQPVHTQKSRQTDYTTEYREKNLETDVTNIIHEIGVPAHIKGYQYLRDAIIMSVDNREVINSITKVLYPTIAKMNKTTPSRVERAIRHAIEVAWSRGKMDTIDELFGYTIHTGKGKPTNSEFIALIADKIRLEYKNRSMKKVLFAASEAVPFIKTGGLADVVGSLPKAYNRDEFDVRVVLPKYRVIPEHFQQQMEYMTNFYINMSGRMIYVGVFQMMLDGVTFYFIDNEYYFSGDRIYEDGLWDLEKFAYFSKAALTMLCVIDFRPDIIHCHDWQTGLMPVYLKNEFWDSSSYSDFYQNMKAVMTIHNLKFQGTWNIDDMMRVTGLPGYLFTSDKLEAYGAGNYLKGGLVYADWITTVSGVYANEIKYPFYGEGLDGLMRARSNNLSGIVNGIDYDEYNPETDPMLVHNYSPYNFRTEKVHNKTALQQELGMQVDGGKFMIGLVSRLTDQKGMDLIDCVMEQICAEDVQFVILGTGDPRYENMFRYYEWKYKDRVSASICYDNTRSHRIYGACDAFLMPSLFEPCGLSQLMSLRYGTLPIVRETGGLKETVEPYNEYTGSGTGFSFANYNAHEMLHVIEYAKSVYHGDREAWNRIVDRAMAADFSWGNSARKYEDLYRSLMNQDTLMLYKLMVLYMLNKVDFPLTNSQISEFILDKGYTNYFTLQQALHDLSDTELIRTEHIHNNSYYSMNQSGEETLEFFGHKIPAEIKTEIDQFFNEHKYHLRSENEVTADYYEDKKDCYIVRCEIHDKKELLVGITLNVTDEAQATAICDNWRNLHGDVYDYLIHTLMIRHMWADKRYHSLDYEMKARYGHKIYKIALDGGFTCPNRDGLIDARGCIFCSAGGSGDFAASRNQSITEQIEEGKQLLAGKRLSGQPEIGSKESPMPCYIAYFQAFTGTYAPIDRLRALYTEAIRHPEVAILSIATRPDCLQPEVLDLLSELNQIKPVWVELGLQSIHPQTAAYIRRGYPLSVYDAAVLNLHERGIEVITHVILGLPGETADDMLATADYIAHQPIQGVKFQLLHVLKGTDLYTDYLQQPFHVLTLEEYTDILIRCIEHMPPDVIIHRITGDGPKHLLAAPDWSRNKKQVLNHIHHCMKLRNAWQGRCYVPLTNDYYDRNMSYSDEIIEKVKAKNPNEPEFIQAVTEVMNSLRLVVDNDPKYQNEALLERIVEPERIIMFRVPWVDDEGKVQVNRGFRVQFNSAIGPYKGGLRFHPSVNLSIIKFLGFEQIFKNSLTGLPIGGGKGGSDFDPKGKSDREVMAFCQSFMTELCKHIGADTDVPAGDIGVGGREIGYMYGQYKRIRNVSEGVLTGKGLTYGGSLARTEATGYGLVYLVEELLKCKGDTIEGKTVAVSGAGNVAIYAIQKAQQLGAKVVTCSDSTGWVYDPEGIDVAALKEIKEVQRARLTEYKKYRPQSEYHEGRGVWQIPVDIALPCATQNELFLEDAKQLVANGCKVVAEGANMPTTLDATEYLQEHIYFVPGKASNAGGVATSALEMCQNSMRYSWTFEEVDAKLKDIMVNIFHNIDNAAKEYGVENNYVAGANIAGFKKVADAMLAHGIVMAEQEKKMSVAQMREILKAQGVRNTSVMRKAELQKLMAEMGLLEDQSDVLDKDKEQPTASVEKGSEHEVKSENKKPYVFRGRTSRAEYAERTERPERTGRTERTERSERTERTERAERLERSERSERTERPERSERTERTQRSERQTYTNGGLYSGRRNTYGQRSENYQRNENGQRSENYQRNENSQCNENGQRGENYQRNDSYQRGDSCQRVDVYQKNEYIQSNEESEIPGYGQLDSGMMANGILEVIPEGFGFIRCENYMPGNNDVYVSPAQIRRFNLRTGDIICGNIKVKTEKEKFSALLYIRTVNGMPPYEAQRRGKFENMTPVFPDSRINLETPNAPVSMRIMNLVSPIGRGQRGMIVSPPKTGKTTLLKQVAKAIHTNYPDMQMIILLIDERPEEVTDIKEYIEGNNVEVIYSTFDETPEHHKRVSEMVLERAKRLVEHKKDVVILLDSITRLARAYNLTVPPSGRTLSGGLDPAALHMPKKFFGAARNMREGGSLTVLATALVETGSKMDDVVFEEFKGTGNMELVLDRKLSEKRIFPAINIPRSGTRREELLLSKEELEGMYVMRKALGGMKSEEALEQILDMFMHTKDNTEFVNMIRHTKMWMREGIHPKYYQAKVTCNCGNEFVTGSTKPEIHVEICSKCHSFYTGQQKAASARGRIDKFNRKYGIKQAMKQSVIHPPQRKISILRNEKTGLSHLLISAPVSMIWTIRMAEDLSKMRYATIGGQAVIEGVMMRNGNDYAVAVRKPDQTIEVKKDQYIGLNARWHMKKIPIIRGVLSFIDSLVLGMSTLTYSASFFEDEEEAEKAKEKDSKSDAVFMGLTVALSVVIAVVLFMLTPFFISSLFGKVIKSPMTLAVIEGLIRIAIFFIYIVAISQMKDIQRVFMYHGAEHKTINCIEHGAELTPENAAKYSRLHKRCGTSFLLIVMVVSIICFMFIRVDNMVLKIVLRVILVPVIAGVSFEIIQWAGRSESCLVNIVSKPGLMLQKLTTREPDLEMLEVAIASIEAIYDWRQFQAENRAAADGNSQKTDRSNAGVSQPMMQWSYDTLLKWGTDELTAHDVENAALDAWYLLEHIYGIGRVDFLMRRSDSFDAAQMEKSTAYQALIRQRSEGFPVQYLTGSTEFMGLPFLVNEHVLIPRQDTEVLVETALSMMKPGCRLLDMCTGSGCIVLSLAKLGTVTWGIGADISEEALKVAERNRENLGLSQVKLVHSDLFGSVEGVFDMIVSNPPYIPTDDIEDLMREVKDHEPHLALDGSRDGLHFYRKLAEESGRYLVPGGSLLFEIGYDQGKAVSQLLDQAGFKDIHVKKDLAGLDRVVYAVKAAEDGGKMFDRLDDILIRYQQIMEELNDPDVVNDQKHFRKLMKEQSDLQPLVEKYTEYKNTKQTIEDSLEMLEVEDDEEMKEMLKEELSEAKSNIAKIEQELKVLLIPKDPMDEKNVIVEIRAGAGGDEAALFAAELFRMYSKYAESKRWKIEMMDVSENGIGGFKECVFMVSGDHVYSRMKFESGVHRVQRVPETESGGRIHTSTVTVAIMPEAEEVDVEIDMNDVRIDVMRASGNGGQCVNTTDSAVRLTHNPTGIVIYSQTEKSQLQNKEKAFRLLRSKLLEIEIEKKHAEEAALRKNQVGTGDRSEKIRTYNFPQGRCTEHRIKLTLYRLGDIMNGDLDEIIDSLIAADQAAKLANMEDEMKEWYQMREDEVLEALGSDANGLSSEKAEALLKTHGENVLRETKKKSVWRVFAEQFADLLVIILIIAAIISMISGNVESTVVIFAVITMNAILGTVQHEKAEKSLASLKTLSAPTAKVLRGGVKGEIPSAQVVKGDILLLEAGDMVTADGRILESYSLQVNESSLTGESTNVEKKTVVLEGEKALGDRINMVYSGSLVTGGRAVVLVTATGMETEIGKIAALMNATKEKRTPLQVSLDKFGSQLAIVIMIISAVVFVLSLYRKMPVLDSLMFAVALAVAAIPEALSSIVTIVQAMGTQKMAREHAIIKDLKAVESLGCVSVICSDKTGTLTQNKMTVQQVYINHQTMGADALDLKQQSHRYLLYDAILTNDSAIVEGQSIGDPTEVALLEMGRKADIKEDILKEMMPRMEEIPFDSDRKLMSTKYRLHGVPTILVKGALDILLKRTDRIRIGDEVRPITEQDVKEILDKNQAFSEQGLRVLAFAYKEAQANQQLTLDEEDHLIFIGLVSMIDPPREESREAVSEAKRAGIRPVMITGDHKITATAIAEQIGIFGEGDMAVTGPELDEMSDAELDENIEKISVYARVSPENKIRIVDAWQRKGAVTAMTGDGVNDAPALKKADIGVAMGITGTEVSKDAASMILTDDNFATIIKAVANGRNVYRNIKNAVKFLLSGNMAGIMAVLYTSLAALPVPFQPVHLLFINLLTDSLPAIAIGMEKAEKDLLSEQPRDPKQGILTKDLMTALFVQGGLIAVCTMIAFYIGLSTDSATASSMAFATLTLARLFHGFNCRSRHSIFKIGLASNIYSVGAFFGGVLLLALVIFVPVMRTLFTVSPLSGYQIGMIALLAFIPTVIIQLYKVMKEHVHAMVEQLYHTPDIYRIYVPLPDNPLKYLNCYVLVSDGETLIIDTGFNRPECKQALFDGLDELQVDFAHTKLFLTHLHGDHSGLTEELTARGVPVFMNAIDYDYLCQELASGGWQAMEQIFLSEGFPMEEIEKQKKGNQARLYSPHHPFPASKVSDNDLLTVGGITLRCIQTPGHTPGHTCLYIEDKEIFFSGDHILFDITPNISVWRNIPYSLADYLESLQKIKGLKVSHTFPGHREFHGDIHDRINALALHHHARLKEILDAIDHHPDCTAYETAGRISWSSRGRAWSDFSPNQKWFAMGETLAHIKWLSDKGAIISTRPLSLNMPNIPNAPAKETAENRYQALCHSSDLFFYSRRFSDDDFCEHVTHYAMERNIDLNEISDGRFYTANDMVRADCQGCEGCSVCCHGMGKSILLDPLDVHRICTYFRIPFEALLADHVELNVVDGMILPNLKMVGEDEHCIFLNQEGRCGIHKIRPGFCRLFPLGRLYEDRSFKYILQTKECVKTDRQKIKVRKWLDIPELDQYEKFVNDWHYFLKDVAASLRKENASDGTIKQINIYVLKEFYMRGFGEEVSFYAQFEQRLKEVKAVLLKMKQFSVAVNKIEDGILHVRSAGLIMKEASQFASDVKVTKDEKTVNGKDILEWMGLKLAVGDVITVNIEGPDEEAAADSFEVFLNRQFSMSTSGQKRIESTIDTAIDCDEDEVMELAMQAGELLLENGAEIFRVEETMDRICRYYGVESASQFILMNYILATAGEGHGHMFAKVRHIPVNGSHLDKVAAVNQLSREIAEGKYTVSEAYQALETIRRMPDKRKSVLILASGVASGAFCCLFGGNLMDCLAAAIAGFLIYVYILYISSPHLSKIVGNVGGGAFVTLVCNLLYMLGLGDHLNFMIIGSMMPLVPGVAFTVAIRDAADGDYISGTVRMIDALLVFICIAIGVGMGIAVLKLLTGGADLMMIQIIAAVIATVGFSVLFGVPSKYYPYCGVIGGAGWLVYLLTLEHFSTAGASLAATMVVIFLSRLAAVRKKCPVTIFLIAGIFPLVPGAGVYWTAYYIVTDQLRLAAETGYTAVKVAVAIVLGIVFIFELPQGLFVRLAGNKMTKEELTLEVIRRLKVAYPLAECTLDYDQAWKLLVSVRLAAQCTDARVNVVVEGLYEKYPDVASLAAADVTDIEEIVRPCGLGKSKARDISACMKILHEQYHDKVPDDFNALLKLPGVGRKSANLIMGDVFGKPAIVTDTHCIRLVNRIGIVDGIKDPKKVEMALWKLVPPEEGSDFCHRLVEHGREVCTARTKPYCDKCCLADICARNIMGIVLGIDIGSSATKIVAMDESKTILNSLKVSASDPVTAMYGAVGKILCEERMQIADVEAVMLTGMGASYVEGDVYGLPTTKVTEFDALGTGGLYLTGLEETVVGSIGTGTVFVHAGPDGIQHIGGSAVGGGTLVGLSSRLFGIRDVEVIADMAEQGNLKNVDWGIAELSRDQMETLPDYATSSNLGKMKSTATNEDVALGLMNMIFQTAGTLAVFACRNVNLKKAVIGGSTATLNQARIMLGQVGELYDIDFIIPKQAAYMTAIGAAFLFQSKMSNCVKIIVGTMAKGKDIMLKIAVIDDEEYYSELIRQTVCNWLLEKGCQGEIDCFDHADDFKTQIENGRCYDIYFMDIEMPDISGMELASYVRMKYDSPFIVFVTAHMEYSVKCYRYHAWQYITKDSIRTLIPETMDSLIQHLQAHKSNYYMIEGANDLIRIAYDQIQYLSKDGKYTLFHTGKPEVFRERRALSKVIEDMQQVDDAFSMTDKSYGVNIRHVLRLKDHMLTMRNGDSVPISLPRYQQVKKAISDYWGRRAWKMEIAGITLRVLEIATVILCGIRLAVPPGHFRWERLWTKVLFCIGIIFWLVINIANIYFFRFSSVTEAITGCGLFIWLIIFYSTYFWQLFAQFFVYWYTVYAFRHLYVFTLCYLEHIHLQNYVTIADGLGWHWIHICGMAVTIIAVTGLCYFMHAKPLFYRRYKRDYKYLAAYVTLEIVIGEILFNNEIEGNFIQGDYILFSIIVFVCLFSLLSAIIFYKGYKDMWYQQQISDINFEILKRQYETIQKVYTEKRMLLHDSVHQDVLILEYLQNGKYREAQTYFEKKIAATKKKSKNRYTGIEVLNLMLNYEIEQAEEKAIRVKCAVEVYHCPVDETELCIIIGNLFDNAIEAAKDLPDEQRQIDFSIQNPNGIFRIEITNPYEGERRKVEHHYLTTKKENTEMHGLGLMSVQKIVEKYDGLMEISDKDNVFRVVVTLMQELELTEKLLKEIEYIEKLQEAEEFDVEKFTGQGGGIYTLFCCMDSRTLLQIINKGEKAKQFWEKFLGKDILDELLKYPELLSMQDAKRAKVTKEEKEFFVKCIFSVSTENGFKFEREERVFDSFYEKLGQYIRIILKQKLIASLVENMIDSLVKQIVQRVFGIPFRCLITDMHEKKDAGQLNGHSSTEEYDDYVSKYLLNERECREFLKKYPIMTELLIRKIRDYINYVDEILQHFYQDRETISKEFHIEQNTMEITKISFNQDEEHFPGRMVAQVSLKSGEKIYYKPHSLLLTEQYQKIENWLWEKMGLEKSRHLVTSRDDYGWEQEVTEAECMCEKEIKKYYYRCGAECCLAYVLGMTDIHMDNVIAHGKYPVIIDTEFMFDRRIEVGTQRKNLQQNLMDTVIHTGFVPNGMGTMHVNVSVLNACDEQRLPVKMPMVIHKGTSEMNISYHYPKLSHKKNMPIYEGKYISFENYMNEFISGFRRAYDCIKADPEVLVGMCQPIMKKSVRYLFRNTQEYYMYITSFNFPELMRNQAKRQLSLWHMNRGLHCNETYRVKILIYEMQCVYDGIVPIFYADGKNLLMGDDEYIENYFQRDNEQQLQLRVEKLSDWDKDFQTKVIQSALLMYAKKKDNWDGQLGQPQPKIGELTAERIAKWVFNAAVLTGDKMEWTSVIYGKDGWTKAGKADIYLYNGLSGILLFFEAMWQKKRENTYHSVVEQLKKQLFEHTDTLIQDGSNRQNDKMGLFDGEAAVAFTYWIMYKFTAEESYMIYAKKQCQFILNNAHQVSSDDLIQGRAGIIILMSLMYEETQDRMYLDTAQKVGKNLVESIQSENCLAGMAHGYSGMAVAMALLGKYTGEENYKEIVLELCRKEDQLFDYSMNNWCDIREGKENPRNTVAWCHGSAGILLARALIHKISRLTTNQLFKDIPLNQVIDQMCQTEKTDWCLCHGQAGLLVIERYIRHVFDYEEEKWYENATKYLDKRLSIEDILNYGIMQGLAGIGMLLLFWEWERDKGTKMKKKSKLMVAVFALILGVSTVMPGMQAQASDMNKFPVQNRTTHDKSHTAGLQTFLLNYHIKTKDIIKSHGMVDGSFGDGTADAVSEYQDLRGLKVDGSCGRITWIDIQTQIRNCKTTTSNSWEFYRLNATYYNSGKSLKRRISDSRWEAWYGNPSDTDGSTVMWHYVGMNLTRYACFGVLMVLILTGCQATPNQDVIANKNDQQVSQSESGTSIEESNSVEESDDDGTVVSEAISETFSSDDGNVTISVQTDAVKVHSVPIVQTEAKDISVDDVKRWAKAFYGTEDVYEATKQMTKSEIEEAILWRQQKINDRESLIEEGYSEADADTMIEYYKEQIESLKASYQKAPDDDERKKRIGHFILYLIMMMIQWKMIEIQVMQIRHRHMENDRDTSNADKTQALKVQGESDGQKAYVSASNRETADYQLHSLMFYWNDEDEGWIDGATPYVNQEEAIRITDEKLKALVDGNWKVNTVWSSSNQWHIQYIPVINELPCLYSDINYTSDDAYAANLEYGQINFTLTDDKIVAVEWESPMEITSTDSQPAEMLPFDDIYTAFKNYMQVKCTLNSLGLASEDETEGTEQAFANVNDISQMYCRVKEKNADNVFQYVPVYVFSGYVSQGDYKEDDWVNHFCVVNATDGTIINTWLGYMHNFTPQNMSSYSTKLTAGLQTFLLNYSKDTKDYIRDNGMIDGQYGTATRDAVKLFQKDQNLERDGKCGKNTWSRIEWYIMNSTFKIKGSWYFYELHATYYNSGNSLAYCPSKDLWRGYYEGSGSISSIKLGWHDIGMKARNYIGLMILTSLLLSGCQATPAQDIVANKNDHQTEQSKAESVVDSTEVADDEKIVSEGYSESFASDSGDVIINIQVGQVKVRPIPVMQAEAQDISVDDVKQWSKAFFGTEDVYEGNSQMTKSEIQEEILLRQQWINDRDRLITEEGYTEEAADAVIQSYQEEIDNLKANYESAPEDDDRQKTDWTFHPASYYMKTAEDGEDEDWSNLDKTDKLKVIGDCDGKMAYVSASNRSTPDYQLHSIMFYWDDEQAGWENNGKSSISQEEAVKLTNQKLKELTDGEWTVNAVWSIGNQWRIQYVPSIDQIPCVCSTIDYTADDTYASNLDYEQIDFSVTDDQIVSAEWDTPTKVTSADSQTSELKSFAELYDAFKTYMKVSTSVSSLGLMEDNSEDAAVNITKIQQMYCRVKEKNTDNTYQYVPVYAFLGKISVSGTEDTNDSIFCLIHAIDGTIINAGLGYMKIRKYACIAISAALLMTGCQATPDQDIVANKNDNQASQNETSQSVDDTIAIDENADGKVVSEAISDSFDSTEGDVTIKVQADQVRAKNVPVLQAEAQSVSADDVKRWCNVFFGTEDVYEYRDEMTKSDIEEAILWRQQKISDRDGLLAEGYTEDEIDSTIELYQEEINNLKSNYDSAPEKYEGTKTDWEFHPASYWMKDETNGDDEDWSKEDKTESLEVRGDYEGKGAHISASNRQDADYQVHDMFFVLNDEVDINYNADPVISREEAIQMTSEKLKALTDKEWQVDSVDNNGNQWRIKYVPVINNLPCLLTDLSYDSTDAYAANLTYEMLEFEIIDGQITSVEWDSPMKITSADNQPAEMLPFDDIYTAFKNYMQVKCTMTSLGMASDDEMEDETTAETEKVCANVNDIRQMYCRVKVKNSDQAFEYVPVYVFSGYASQGDYKEDWWVNHFCVVNATDGTIINTWLGYMLAYDKKQIGRIHRILIPAVIFTAAVLLGRMDTIMADFGQSEPLAAGKALSFAFESLTTGNALLVAPVICAFPYGAACIDEVKSGMFKNVLYRTDKASYIHSKAAACMLSGAVTLMGAALLVILISAVLLMPLETASGTANAAQAADIADTAGATGEIAQSYEIQQLIGLVFRYGCFGAVWSLVGMLLSLWTFNRMMAWIGPFIVDYLLEIVYERYFDALKLLYPKEWLVMSWSWPLKDWGICLWLLLLAGMIYLVVRRTGMRCLERVVMWYKGKMVLSVASYNFLRWHKNARVVTAFLLDFILCYLLTDKAVQFALERDTTMQIFEAFIWTFGDSNAILLVSLLLLILFADMPFITTATPFYLMRTTRRVWVVGQMVYVALATMLFMIFTLFSTVVLTMQNAFAGNRWSRTAAALAYSGSGKELNLPSAVKAIEMSRPWQSMLWVLALMLLYTLVMVLVMLLFNIWKGQIAGIAAVISFSCYGLLLNPDNIKKVLHLPDQLSYKARVLVGWISPLNQATFYMHNFGYDKLPTLGQTVAIGLALLAVLLILTICAIRRYAFSFSGTEGKMRDVIRVMDVSKSFGEETVLHHISYDFKEGRIYGIVGNNGSGKTVLMKCICGFLIPDSGEITVNYKRIGKDMDFPPDTGIIIETPGFLPNLTGMRNLELLASLRKKIDKKAVAQAIREVGLDPEMKKPVSKYSLGMRQRLGIAQALMEDPSLLILDEPFNGLDKHGVSQMHELILAQKKKGKTILLSSHSQKDIDVLCDVVCEMDGGVMHCIRYRMEDTYAGMQDDREDKAGVQDADNCLCRLKDIVKWYPPDRLVLDQFSLEIGRGERVMIRGNAGSGRTTLIRILDQKIKPNEGTLLCRGSIAAIYETTGILESMTLGEQIALPLLCQGYSRREAMAHASEWLKKIGEEIREYHKEDRITAYDRALIAVGQAVLQNPDLIAADTFMTDLNRAEQARILKILDDASKDRACLLMTDEIFCGFPCDRILELRKPMDRQPADNMSWTMRKRLLAFLMVLCLCQMPQMVWAAEVTEKMLQGTETEKLTEAETVPESEKQTETEKNQSESEQTESNQSDVIFQIDDTHIYEGMEKAYKDGYEPTVADDKVQMVLPLVAEDMKAVSSVTVTPNLGDAGTVPFVYKNYQKTFKATEETVNGTKDKKQVFLVSYTFPLKSDRKNGTYPVVFDVSAKADGQEIQQSFTLYVTIADEKKKDTVKKDSTSDVSVSNDGDGSSDEAEKPTSEPKLIITKCQSDPERLEAGKDFTLNVEIKNTSKIKYVQNMTIDVTCAETNLTLKADGNTFFFDRLGSNETLKLPLTFSASAGIQEGRYDIQLSMSYDNPDASSLSSSGTISVDIHQPLRVELEADELPDSINAGDTMNINVQALNLGKGAIYNARCVVDAPGLSTGTSAYIGSVEAGSAANGTLKIFAGMKESSADGEMYGETSGKLILSYEDEDGQTYTAEKEISTVINPLDLSTDSSQTEEKKQGVSLQWYIGVIAAAVILGTAGVIIYRRKAKQHEQEMSRNKKGRWWYLAFKTLSLREILLPVIGFAISFVWIWNAAGQYLNLFKELQKPVVIQAEMFQNLSSDMRTSILSMQGVEALTPYSEQTAVMQWEDYSGEVSVYYVESDYMKWLSGQAVTAGVPFSGGMPYGIVSEKALENLKKKTEEQSRITSMQSESESAADENRVIDRSSQKDKKKQGLALEKEDLLKDFTLDDSQSVRLYGIDQNEQLPGIYLSDQWADTSDEMGFTVSGGGMSADPEGSDMPADPGDLDMYAESAGKDSMNSKKSASTSNNSNSSKITERTGTDRSDSTAVDEGQQVSVKLMIAVKNGFNVSPVIKELEQFQISAKSDVTDVIRQTNEKNIFRLETGAMILICAIFMMQMSERVWKILHVRWLEDIRRFGAEKKGDRKLLHRRRLMIAGLGLIGSFAWQWISMLYGWLMLGNQWRQVYNSVNISFLIRLSADSDAGREFHCTKDKLNREDSVFCLQMRLPEVFESADNRYRVERYLGEGGSGRVYLVVCQEDSCCYALKVSADDEVSRVSLYREARILSSVVHPAFPTVREIWEAHGRVCLVMSYIRGRTLQMLMNRKLYQGEKCFEPDEVLPWMMQLAEGLSYLHRHSVIYRDLKPSNVMVTDSGQLGLIDFGATCILGDGMEVGEMGTPGFAPPEQYSHVCGPGPWTDVYGFGALLHFLLTGDYPAEKIFFFREIRLCPKPGRQWSVGERVFRRRQLRIMNQLVLECTAREPEKRRTSWRRISRMLYAASKDASRRRRMFFRRLSIGIAGLFLTFYLSLSAFANYWRSAAYERTLDQAESADAESILLNAIGMMPERIDAYQALYDAYMQDGLLSEEEWQQIQKLMRLNREYLKADEAKLVILSYQLGIAVYLQSDAGISKGQAAAWFQNVEEADMEELDLGVYDEWKYIWQKRAVIFRRWSLSEVFDLENSQKPSAGSTERGLFWTEVHSVLQDDLYPEEPRWELAVYDRILGMMVERAVYDMQSENVSEEEIEAVLTEINRRLAEDDGSARQNEKEIILEKEAMLRKRMQMAAEVRQMRRRMIVLLVVMLVSGVLMGMSGPEDTGLKLSVKKVSKADEGREIYTGQESVSLVLAWNEHAEGTAASDVQWIMCRGRDHLGYQKEEKRQTEGRGTMTYVPDLSVFADGEVTFSFWAVDQAGNTGEEAQIVLMKDSTCPVITGRLDTKGRRVGDFYSDSCQVSIFVQDENFDFSYRPSVQTENEDGYSFSGWRRNGDKAEGVMTFDGEGTYRLTFSCRDLAGNEAETLVVPEFTIDRTAPEVSVKFNESDSHHETYYNQVRKALITVNEQWFRPEDGRITVVSGGEEKKVTEIDWVKTDQGYQSEILFERDGMNALTIEWSDPAGNQAKRYQSGAFVLDTVKPELSIKGVEAYSSNNGKVEPVIDIYDVNLDEGEVTVALDELTGKKVEMPEVERQETDTHHLQLAMGDFGSEMDGIYRLSVHAADLAGNDDEAELFFTVNRNGSYYAFDQKTEAMVQKVFISSPEKVVIYENNMDWLTDSSVILSCNGSLRELKPEKDYTIEAVGNETSRKQYTYTIDEKCFSREGTYSLYLDSKDRASNYSSAEQQAQTIGFIVDRTAPRISIINLEEQQYYHGTSHNFQVTVDDNTQLSCVKYYLDGRLEEQFSKDEIEEAERLLELQTGASDEYQTIRIVAEDKAGNTADSGEWHVLVNTSDRTRKFKKHTEQSRTQWRQNSAEPEKQQDNDRQEVGLIAGIVCVILVGGVVWYRHEQKKKVSIRRLPDTDDRKMSAADTSYMKEKPVLSLLLSMGIPMMLSMLINSLYNIVDGIFVARMSEDAMMAISLVYPVQNLLHSIAVGFGVGTNAVIAIFLGSRKGDAASSAASQGILLNLCHGLVFMVFGILFMRPFLNMFTSNETVIAYGMQYGIIVLCFSMIHSTELSFEKIFQSVGRMKTSMISLGSSCMINIILDPLLIFGIGPFPEMGIRGAALATGIGQTTGLCIYLLTSRIKPLNLQFKMQYFKPDKNICRRLYGIGIPATLNMALPSFLISALNILLGTFSDTQVLVLGIYYKLQSFLYLPANGMIQGMRPIMSYNYGARESSRVRSIYQTALYIIILILLAGTVLCLAVPDQLIHLFSDNTETIVAGRQALRIICIGFAVSGVSVVTAGALEAMGKGIHSLLISCMRYIVLILPLAFIFSHFFGVNGVWHAFWITEVITAVTSGLIFYRQYRAIAMKTLVIAEKPSVGRDIARVLQCTRNSQGALEGEKYIVTWALGHLVTLADPEGYDAKYKSWRIEDLPMMPQHFKLVVIKQTHRQFQIVKNQLLRKDVGTIVIATDAGREGELVARWILKIAGNKKPVKRLWISSVTDKAICEGFKKLKDGRAYLNLYAAAEARAEADWLVGMNGTRALTCRYNAQLSCGRVQTPTLALIASREQEIKSFVPKKYYTLTTVSHGMTWNWQDGKSGSNRSFDRGRIQSIAEKAEKDEMVITDVQRTVKKSYSPGLYDLTELQRDANKRFGYSAKETLNIMQRLYENHKVLTYPRTDSRYIGKDVAETLKERLQACAVGPYRKVAGKLLLQPIRMDKRFVDDSKVSDHHAIIPTEQFVQLDHMSSEERKIYDLVVRRFLAVLYPPCEYEQIKLTGSCAGEKWTAGSRMMKEAGWQQAYESEWEEEDDDLLMTVTSMPKLEKGRKDTVMRPKASEGQTKPPAYYNEGTLLTAMEKGNLGTVATRADIIDKLFNSFLMEKKDKDIRVTSKGRQLLGLVPEDLKKPELTADWEEKLLAISEGRLKKDVFISEIRGYTEEIVKEIAGGEGQFRHENLTNHLCPNCGKRMLSVQGKNSKMLVCQDRSCGYRESIARKTNARCPKCHKKMEMYGKGDAQTFVCTCGYKEKLSAFQNRRKKEGAGVSKRDIQQYMKRQQKEANEPINNAFAAAFAKLNLETKEGEMNFVFVSPQFPTSYWNFCDRLKQRGVTVLGLSDAPYDSLPEQVKNSLTEYYRVDSMEDYDQMVRALGYFTHQYGKIDWLESNNEYWLTQDARLRTDFNITTGMKSDQVANVRRKSAMKAFYKKAGVPTARYHMVSSLEEGLAFAEKVGYPVFVKPDAGMGAEESYKLSNPDEMRYFYETKSDVDYIMEEFITGDIWSYDGISDSKGDIIFETTVSWPRSVADIVNNKDHLSYYTANMLPEDLRRAGRATVKAFDVRSRFFHLEFFRLLDDKEGLGQKGDIVALEVNMRPAGGWTPDMYNYANSVDVYSIWADMVVYDKTYVDLNQRKYFAVYAGRRNGKNYIHTPEEIRERYHDQIMMDEDIPEIISGAMGDHMWTARLDTEEQKDEFIDFVQATWQMPFIRTTTNVNLAVDQEKRLRTGTAELVRDILNKDPIRMMTAYEGNIHLCRGGDDRRNVPTAFVECKFFGGGGYEVFEAFDKAMHELYRNVLSIQPQDLYIKYEVIYGWDEPAKIFKIMLDINVKDVSLVLEGGTFRTVFTMGILDAFLDEGIMMPHISGVSAGITYAGSYISQQKGRNIHILKKYRHDKRYMGVRNFLTDRSIFGLKFAYDTLVNELEPMDWEIFRAYKGTMAVGVTNARTGQINYMDGLRMDKSCRMLQATCAIPLLFPAIEMDGQYYYDGGVCEPITIHKAEADGYRRHIIILTRDKTYVKEKSQSNEFAAKVLKRRFPNMVRPLLERHDYYNEEVAYCNELEAKGQALLFRPDYPLVSMEKNIDKLQEGYDMGYRQAMARMVEIKAFCGLNMRVGLISDLHIDINKDYPIVELTAETAAEQMTDVLVIAGDISETQNQTLQAIERLQSLCEFPVYYVPGNHDMWNKNCPECTTEEIDRIYREDLRCLSGKPVILEKDGRQLALVGDVGWYDYSMASPEYSRDVLDGMMMDGRTWQDKLYNQWTEDNQKQMFRCLKQLEKQLKDCGNLPVLAVTHMLPVKDFCVPEKPDGIKWGFFNAFLGSTALEELYKKYPVRYAVCGHVHYRSTVERDGIRHICPCLGYHTEWPLYHLADERAQTHIRDALYILETPMDIISRKEILQHVDHTLLAPTATWEELQILCDEAIKYETASVCVPPNRVKQVKDYLCGRMAVCTVVGFPNGYHTTAVKAMETEEVLDRGADEVDMVINLGWVKEKRFHDVQTEIHTLKDICDDKILKVIVETCFLTEEEKIKMCEVVTEAGADFIKTSTGFGSGGATFEDVALFAAHVGENVRIKAAGGIGSFEDAKHFLELGASRLGTSRLIKIMELGQMNEIDFILEQLKGLTAIDSPTGFTEYAAEHVMNVYKKMGYAPVQTAKGGIFIDLGGKNEEDAILLTAHMDTLGAMVHTVKSNGRLKLTPLGGLNPNNTEGENCRIYTRSGRIYDGTFQLIDASIHVNGEYNDTKRSFDTMEVVLDEDVYNKEGVEALGIRTGDIVCFDPRTRITDSGYIKSRFLDDKLSVAILMGYANYLQEQDIVPERRIYQHISVFEEVGHGCSYLPAPVSEVLAVDMGCVGEGLNCTERQVSICAKDSHGPYHYATVSALVAAAEEQGIDFAIDIYPHYGSDADAALDAGYDIRHALIGAGVYASHGYERSHIEGVRNTFELLKAYLDMYILKTGAAADRKYSIFLKAAFKNYNNLCNCSELTSKMLRISSVWRIRQIKFQNRLKNASILYLFLKFCLALNSYKFIMKEDKKHACKNWKKMHVKIGRNDPCWCGSMKKYKNCHQSFDEKIEELRSQGHIVPDHSLIKTPEQIAGIKESAKINIAVLDEVASKIKEGMTTEEIDKIVYDTTTKMGGIPAPLNYEGFPKSVCTSINEEVCHGIPSPKVVLKDGDIINVDVSTIYKGYYSDSSRMFCIGNVSDEKRKLVQVVKECVELGLEQVKPWGFLGDMSQAVYDHAVANGYQVVRNIGGHGVGLEFHEDPWVGYIYKKGTQMVMAPGMMFTIEPMVNMGTHKISVDKKNGWTVYTNDKKPSAQWEIQVLVTEDGHEIIAYMLWILIAAAVCAGDLLVKHYIDTHKEENCHEPVVGGHIIITRFHNPGAMLGWMKDKPKMLMGVTILGIGVLAGGLMGSLYKKKSVLIRLGLALLLGGAASNAYDRIMKKEVTDYFRISIGSKRLERIIFNIGDMAIFIGGILTAIGEIKESFMAVKYVFVTGGVVSGLGKGITAASLGRLLKSRGYFVTMQKFDPYLNIDPGTMNPYQHGEVFVTDDGTETDLDLGHYERFIDCSLNSRSNVTSGKVYWDVLSGERRGDYGGSTVQVIPHITNAIKSRFYRNPASRETEIAIIEVGGTVGDIESQPFLESIRQFQHEIGRENCMLIHVTLIPYIKSSGEMKTKPTQNTVKDLQALGLQPDVIVCRSELPLDEGIKDKISLFCNVDVHNVIENLDVDVLYEAPLALEKEKLAQVVCKRLGIDCPEPDLDDWKAMIHAWKNPTRKVRIALVGKYVQLHDAYISVVESLKHAACANGAEVEIQWVDSELVSSFNVADILKDADGILVPGGFGDRGIEGKITAIEYARTHNVPFLGLCLGMQMAIVEFARHVLGYTDAHSSELNPNTTHPVIHIMPDQHNVTDLGGTLRLGAYKCVLDENSKAYALYGEKVIEERHRHRYEVNNEYRDVLTENGMKLCGISPDGRIVEMIELKDHPWFIATQAHPEFKSRPNKPHPLFKGFIEAALKYEDILQAEAEAESPADAEMDNQKMNNNRPNQDPEGGNNKKDDMNKKSLLVMVVLAIAVMIIAQMLSGKIASASQKEVTYTEFMQDVKDGKVTKVELDSDRIYYEVKNQKNVKYYTGNVQDERLYEELDNAGVTYSRKVIDTTTYVMSSILSFVLPTVLMVAVMMIFYRFAFKGGGGVMGVGKSNAKLYVQDKTGVTFQDVAGQEESKESLREIVDFLHNPEKYTKIGAKLPKGALLVGPPGTGKTLLAKAVAGEAGVPFFSLSGSDFVEMFVGVGASRVRDLFKQAQQNAPCIIFIDELDAIGKSRDSRFGGNDEREQTLNQLLAEMDGFDSSKGIIILAATNRPEILDKALLRPGRFDRRIIVERPDLKGRIDVLKVHAKNVCMDETVDFKEIALATSGAVGSDLANIINEAALLAVRNGRNAVSQSDLFESVEVVIAGKAKKDRVLSAEERRIVSYHEVGHALVAALQKNTEPVQKITIIPRTMGALGYVMQVPEEEKYLMSEKQIREELVTMLAGRAAESIVFDSVTTGASNDIEQATKLARAMITQYGMSEKFGLIGLTTVEDQYLGGRATLNCGEATAAEIDQEVMKILKAAYDQALALLADNRDCLDKIAAFLIERETITGKEFMKIFREVKGIPDSETEQAEANVSNPAKNDSQPDGQDEPTLVEAKTDNGASSESDINVSLETKAEDMFDIQEELKKLPAKPGVYIMHDVHDDIIYVGKAIILKNRVRQYFQSSRNHTPKIRQMVSHVARFEYIITDSELEALVLECNLIKEHRPKYNTMLKDDKTYPYIKVTVGEAFPRIMLVRSMKKDKAKYFGPYTSSQSVRDIIDLSQKIYKIRSCNRSLPKETGNDRPCLYYHMGQCQAPCQGYISQEEYHENVRQMLHFLGGNFEPVIQMLTDKMYAASEKMDFEKAASYRDLLNSVKQIDQKQKITSSEMDDKDVIAFARDKDEAVVQVFFVRHGRLIGREHFYVSGVANDTESQVLTAFVKQYYASSPFVPSTLMLQYPLDDREVILEWLSGRKGHKVREVVPQRGQKERLVELAAENARNVLTKDREKIRLEEARTTGAVRDLAEMLGLPAGIRRMEAFDISNISGVETVGSMIVYENGKPKRNAYRKFKIRTVKGQDDYRCMEEVLTRRFQHGLEETVSGEEGKFSDFPDVLMMDGGKGQVNVALKVLNQLHLKIPVCGMVKDDHHRTRGLYYQQVELPIDTHSEMFKLITRMQDEAHRFAIEYHRQLRSKTQVRSVLDEIPGIGPARRKALMKYFGSIEKIREADEEELMKAESMNAGSARAVYAYFHMYNTSKGNYSVKLNKVIEKFNLKNLTPEVDTKKIVIRQTDVNRPALQFAGYFEYFDYSRIQLIGKVEYSYLKMHDDDYIREMTEKIFKAGIPCMIFCRGLEPRPLFMELGNKYGVPVLATDDGTSSFFSELNRFLKIELAPRISIHGVLVDVFGEGVLITGESGIGKSEAALELVKRGHRLVSDDVVEIKKTNNDELIGTAPDITRYFIELRGIGIIDVKTLYGVQSVEESQSISLIIKLEEWDREREYDRLGLEEQYEEILGNKVVCHSIPIRPGRNLAIIVETAAINHRQKQMGYNAAHELYRRVTGNLQKKREEDMDQFCFGVDLGGTTVKIGLFTVDGMLQEKWEIPTRTENQGAAILSDIAASIQNKVDVRHLTKEQVTGIGIGVPGPVLNENRVQGCVNLGWGNVCVADELSALTGMKVKAANDANVAALGEQWQGGGKGYQNIVMFTLGTGVGGGIIQNGQIVSGANGAAGEIGHMVITEPENVVGTCGCGHQGCLEQIASATGIVNLAKRQLTECDEASILRQYAPLTAKDVLDAAKAGDALACRVAEQMMQALGRAAAYIACVMNPDVFVIGGGVSRAGEYLTEGIRRYYQQYAFHASAETPFVLASLGNDAGMTGAAGMVCNFMDFYHRLLEAAGSDHVLRDEPMAVHTTFRIGGPADYFVEPADASALAKGIALCREVDVDYFVTGNGSNLLVGDGGYRGVIFHICHTMDHIQYEEQEGELLVEAGAGVMLSKLARQVSSMGYTGFEYATGIPGTLGGGVTMNAGAYGGEISDNILWAELMDETGAILKLEKEHLKLSYRHSVMMEHPLVVLRAAFSFKKGDAAAISDRVTELSRLRREKQPLEYPSAGSTFKRPEGYFAGKLIQDCGLKGFRVGDAVVSEKHSGFVINAGQATAADVMALIRYVQQEVEEKFHVRIEPEVRLLGEFMRFVIVTGMSGAGKSSVLKMLEDAGYFCVDNLPVPLVLKFAEISWHEENMMSKVALGIDIRSRNHLNMLEDVLKSVRDEGYDYEILFMDCKDDKLIKRYKETRRNHPLAAGGRIETAIAEERQRLSFLKKQSDYIIDTSNLLIRDLKKEIQHIFVEDKDYSNFYITLLSFGFKYGIPADADLVFDVRFLPNPYYVDELKHQTGNDKPVYDYVMKSEDAGIFLKQLYDMLVFLIPRYIAEGKNQLVVAIGCTGGKHRSVTITNALYEKMKDLEYSIKAEHRDVDRDGQHKSSQVRMSFSSKVKEELSKECNSPRHCCIAETAAIISMCGKVIFDEKDHVRIEIHTENVTVARKYFTLLKKTYNINTDISIRHSSSLNKNRSYVLSVNDDETARKILMTCRLMKPFGVIEEDFSISDSLIIQRECCKRAFIRGAFLAAGSVSDPVKTYHFEIVCLSEAKAKQLQMIMETFNINARVIKRRKYFVVYVKDSSQVVDLLNIMGAYNALMDMENVRIVKDMRNNVNRKVNCETANINKTVSAAVKQIEDIRFIQMSSAFDELPESLQEMAELRVRYPEATLAELGQLLDTPVGKSGVNHRLKKISLFADELRERHHQMISKNITINIPTDMEARPVALLVQVASQFESNIYVEVEDKKVNAKSIMGMMTLSIAPGEEVTIITKGVDEEEAMNKIEEYLTTSKMDFTHLHVHTEYSLLDGSNKIKELIARVKELGMDSVAITDHGVMYGVIDFYKEAQKQGIHPVIGCEVYVAPGSRFDKSGNMSSNRYHHLVLLAENDTGYHNLMKIVSKGFTEGFYYKPRVDKELLKEYHEGIIALSACLAGEIPDALRKGLYQTALNAAQEMAEIFGEDHFYLELQDHGIPDQKTVNQGLLRLAKDTGLELVATNDIHYTLAEDAQAHDVLLCIQTGKKVADTDRMRYEGGQYYVKSPEEMASLFPYAREAIENTHKIAMRCHVDIEFGHYKLPEFPVPEGYDSWEYLQKLVWDGFYERYPQADEKLKERVSYELNTIKTMGFVDYFLIVWDFIHYAKEHDIMVGPGRGSAAGSIVSYCLDITTLDPIRYNLLFERFLNPNRVTMPDIDVDFCFERRQEVIDYVVRKYGKERVVQIVTFGTMAARGVIRDVGRVLDLPYAICDSVAKMIPNELGITIDKALKMNPELKKLYDGDDSIHNLIDMARRLEGLPRHTSMHAAGVVISPKAVDEFVPLSRGADDVITTQYTMTTLEELGLLKMDFLGLRTLTVIQNAVKLINADGRHHVDMHEIDYNDKAVFDMIGTGKTDGIFQLESSGMKSFMKELKPHNLEDIIAGISLYRPGPMDFIPRYIKGKNEPASITYECPQLEEILEPTYGCIVYQEQVMQIVMKLAGYDLGRSDLVRRAMSKKKADVMAKERQYFVYGNDELGVPGCIANGIDEATANRIFDEMTDFAKYAFNKSHAAAYTIVSYQTAWLKYYYPVEFMAALMTSVIDNSVKVAEYIMTCRQMGIKILPPDINHGVSSFSVDNGRILYGLSAVKSIGRPVVAAIEQERALAGPFTSLKNFIERMSGKEVNKRSIENFIKAGAFDSFGATRRQQMMVYAQIMDQVAQDRKKNISGQMTLFDFMDEEEKQAFEIRYPNVGEYDKGTLLSFEKEVLGVYISGHPLDDVAESWRRNVTAVTSDFYVNEEIGMPNVVDQSLVVIGGMVTGKTVKSTKNNKMMAFIQLEDLLGTVEVIIFPNDYEKYQAELTEEAKLYIKGRVSASEDQQAKLIAEKIIPFDKVPKEVWLQYPDKNSFIGQQEALYKTLAGHSGNDRVIIFCKVEKAIKKLPVSWNIKAEEEILDQLGTVLGKENVKVRETVLKSFMNDGVKTIGVLTSGGDAPGMNAAVRAVVRTAIAYGCQVKGIQKGYSGLLEEEIIDLYAGSVSDIINRGGTFLYTARCEEFRTEEGQRKGAEICRKHGIDSVVVIGGDGSFQGARKLAAHGINTIGVPGTIDLDIACTDYTIGFDTAVNTAMEAIDKVRDTSTSHERCSIIEVMGRNAGYIALWCGIANGAEDILLPELYNYDEEALIDHIIANRRRGKKHHIIINAEGVGHSTSMAKRIEAATGIETRATILGHLQRGGSPTAKDRVMASVMGAYAVDALMGGKSNRVVAYKDGKYVDYDIEEALAMQKELDPFQYSVAKILARMITSVSNPQMKRIKELLNKSKQRRKEKCFVAEGIRMVAETPADRLERVYVSESFYRHPPELRGLDLSKALIVDDQVFRQVSDTQTPQGIMAVVRQQENSLDAIMKQPDALLLFLENIQDPGNLGTMMRTAEGAGVTGIIMSRETTDIYNPKTIRATMGSLYRMPFVYVDDFCETIRMAKAQGIRLYAAHLKGKHTYDGEDYRQPSGFLIGNEGNGLTQEAADSATDYIRIPMGGQLESLNAAVAAAVLMYEANRQRREQLMEQMEIIWLALMAVLLIIEIMTLGLTTIWFAAGALFAFLTALLGLNQGIQIGVFVVVSVVLLFFTRPWAVKYLNTRTVKTNTEALVGKSARVIADINNLKGEGQVVINGLEWTARSSDDTIIFRTGDVVTVVGIEGVKLIVEGQKKGDMILVIVLIIILLLILASCLKIVPQAHAYVIERLGAYQGTWSVGFHIKMPIIDKVAKKVILKEQVVDFAPQPVITKDNVTMRIDTVVFYQITDPKLYCYGVQNPIMAIENLTATTLRNIIGDLELDETLTSREIINAKMRSTLDEATDPWGIKVNRVELKNIIPPSAIQDAMEKQMKAERERRESILIAEGEKRSAILKAEGHKESVILQAEADKQSAILHAEAVKEAKIREAEGEAQAILKIQQANADGIKFIREAGADSAVLQLKSLEAFAKAADGKATKIIIPSDIQGIAGLATSIAEVVKEADAKMRKLRQWTLNHPLQFVSVFMLVYFTWFSLLEKYAQPVLMIHSKLDDKIPFCEYFIVPYLLWFVWIAGTFVYFYIKSRDDFYHACRYMFTGMIVCLIIYTLIPNGLNLRPEITNNNIFSRLVDMIWSVDTATNVCPSIHVFNSIAINTVIQHSNAFKHKKLVHVGSYILALAICMSTFFLKQHSVVDVFWACVLGLILYPLSYKSAFDDSRESEYDVKASMKEKILKCLREAEDYVSGQELCQMFDVSRTAIWKVMNQLKEEGYVIDAVKNKGYRLVQTPDLVTAEEVESLLETSWAARPVVYEEEQASTNQTAKMLAEQGASHGTLVVAERQVSGRGRRGRPWHSPKGSGIWMSILLRPQIHPMSASMLTLVAAMAVYDAISSRVEGCAIKWPNDIVIDGRKVCGILTEMSSELDNIHYVVIGIGINVNTDDFPEDIASVAASMHVITGAYYKRAEIIADTWKAFEKYYDLFVQTENLALMVDAYNQRLVNMDRRVMIEERGHRYEGTARGIDAEGALLVERDDGTTTSVISGEVSVRGVLGYVMFQDKMVLCASSAYEKKFYLNENFEGLPQHVKDELKIMCVLFTEDVGGVLSLEFDENGNLELNTSADEGDLLYDEIGSVLKIKQMQQEKQELFESLETYYKVFFLGEDIEDDNGDMIMAIDVSNTNITLGTFKGEKLLKIYRVTTKVPRTSDEYGVLLRDLVRLSNASHHDIEGVIIASVVPNVMYSLTNACIKYFHVHPVIVGPGVKTGVKVGAENPKEAGSDLIVNAAAVKELYGVPAIVIDYGTATSYQLVLEDGKLDSVVIAPGIQTSVQALTSDAARIPEVEIRKPKTILTKDTTECIQAGIVYGTIGETEYIVRKMKEESGLENIKVVATGGFGKVIADETDVIDIYDNMLTLQGLRIIYYKNVAAGRKSRKIQNMMMKPLQIGNLCIDRPVILAPMAGVTDLPFRVLCREQGCGMVCTEMVSAKAITYKNKNTFLLMETVPQERPVSLQLFGSDSDIMAEAARMIADRDFDVLDVNMGCPVPKVVNNGEGSALMKQPELAGRIVRSLVEAIDKPVTVKIRKGFDDDHINAVEMAKIAEANGAAAVAVHGRTREQYYSGKADWEIIRRVKEAVKIPVIGNGDIFTPQDAKRMIEETGCDAIMAARGARGNPWLFRDIIDYLEKGILHEKPSLKEMTDMMLRHAEMHIRYKGEYQGIREMRKHVAWYTAGYHGSARMRQAVNEVESYEALKQLLADWLAYSEGGMKAHDKNNGSMAETKKNIMTFAGLRALEDELFDLKVYKRKEVAQKIKEAREQGDLSENAEYDAAKDEQRDIEARIEELEKLLKNVEVVGQDEVDADTVGIGSRVKLYDVEMDEEVEYTIVGSTEADALNGKISNESPVGAALIGSKVGETIVVETISGDLEFKILEIARAMAEAKNNQTPDVSEQDKIRRGKLADLQAAGNDPFLITKYNVTHHSMEIKNNFDELEGQEVTVAGRMMQKRVMGKASFCNVRDLQGDIQSYVARDELGTEAYQAFKKFDIGDIIGIKGKVFKTKTGEISIHATEITLLSKSLHTLPEKFHGLTNTDIRYRQRYVDLIMNPEVRDTFIKRSQILKEIRNFLDGRGFMEVETPMLVSNAGGAAARPFETHYNALDEDVKLRISLELYLKRLIVGGLERVYEIGRVFRNEGVDTRHNPEFTLMELYQAYTDYEGMMELTESMFRYLAEKVCGSAVLSYNGTIIDMSKPFERITMMDAVKKYSGVDFTEVKTDEEAKKLADEHHVAYEARHKKGDIINLFFEEFCEDKMIQPTFVTDHPIEISPLTKKKPSNPELVERFELYIYGREMCNAYSELNDPIDQRERFAAQEEAFAAGDDEANHTDEDFLNALEIGMPPTGGIGYGIDRLVMLLTDSQAIRDVLLFPTMKSLDGVNKKNDVNNTASEAPEKNVKTESEKIDFSKVKIEPLFEEMVDFDTFSKSDFRAVKVKECVAVPKSKKLLQFTLDDGTGTDRTILSGIHSFYEPEELVGKTLIAITNLPPRAMMGIDSCGMLLSAIHEEEGEEKLHLLMVDDHIPAGAKLYMGLFGKSKKERETEYMSRLDVPSCLKEDFELIIDDIFTIMGVGTVATGNILTGMCREGENACIYKANGDILETRITTVDVHTKERKANGCGYKTEHVGLGLRGISKEQLEKGDKVLVKNANMYGMMAKGSVRKKGKKWYYRFYVEDASGNLVQKEFAGTESKSETEKMLRKAMEDYDAKKFLAKADNLTLGQMLDVWAEEDLKTGSLSNGTVGNYLQAVNRIKQHPIGNRKLKTVTSEHLQKFMDLLAFGGEEGNFKSKGYTIDYIRSFHAVLQQSFRFAVFPKQYITFNPMQYVVMRRKAEEDVDLFSDNDEDAEVINPITPEQYQTLMEYLEERNKPAVLPVQIAYYTGLRLGEVCGLSWSDINFEEQYLTVRRSVRYNGARHKTEIGPTKRKKVRIVDFCDTLADILKKAKKEQRKQVFSYGELYQRNYYREVKEKNRIYYELYHLDGTEDIPLDYNEIDLVCIRPDGAYEAPATVETALRTARKRLSELDDNFHFHTLRHTYTTNLLSNGAAPKDVQELLGHSDVSTTMNVYAHANREGKRNSARLLDKVVGEMLKDKELRKTIGSRAKSRRQELGLNQPYVAEKMGVTASTIQRYEAGTIDNTKKMTLEGLADALHVSVEWLKGETDEYETDITDKRELQIRDVMTSILNKLPYDMEQSESDFSKDLLLLMLREYELFVDSFQFACKNFKGNTDNKMLAQTMGFESNKEYNEIMFLREITHTVNALNDMGDIVRLYSKNPETAKNRLANLLSEKDPDSVMTELKFALSIEEAADYTGIGRNTLRNLVEWEKLPILRVGRKILIRRERLDEFLILNEGKDLRDRHAVKAVKGTMKNEMPRNSFVQMSKLHNVRGRIYYISSDKKQENLYAVYETTDRKFWTELAKCNQAEFKKSGTEGKCIEAREFIIALPESFVDYPPDGLLKYMTDKFKSRYGVDCIAALHHNKRKTNYHIHLIFAERNYLDEPIEKIATRNMFYDEKGNHVRTKKEILDENGTIRKRCKVIKKGEVYERQMFTIKDARFKQEHFLDEVKVFYTDVINGLVKDEKEKLSAFKRGDVYLATKKIGKNNPKADKITLNNKVIQDWNRTVDHALVSGMERKEILKVKQEQISTPIKESIHKYGNHPELLFMIIFRAIELLKELIKLLIQKQEQQKARISDLMERRNEKQEKQPAPSVTQTDNQTIPAVTQPFKAPATTTAEKTVIPPRPRMSELAHDYEMRLEEIMEKLKRQNRAIHTQEVKKDLIDEDLKNCTGLFQGKKRKELQAQSNKYAETIKIMKQGLSHIVQDYKYPTVDAFLQVYKQGKSEYESYVKANKEWNSKYGENSIHRKLAEKQAEVQKREQDRDFNYRSPSDRGARMITKWATSIANKLAELSGEDVSADQLEIYIYGLECFLNTFITIVLLFVWGVLSHTLGYTLIWVITFSLLRHYTGGAHAPTQLTCILGSFFLGCLDKWAIIYLKPTVLGYLILVLMCILFAPISNHKICLTTKQKWIHKLISVIIVSIGFLLFYKIGNTKMNTTLFYSFFCVIILMIVETIKNLMRHFKMKMKITILEDSVIESERLKNGIRKYGQQYDWDIEIDEYESGEEYFSKNSEGTTIQASAFFLDIQMGQMNGIEVAKRLRESGYQGIIVFLTAFREYVFRGYEVRALNYLLKPVKENTLFLCLDEIAKELSNNTYIYRNKQEIVSIPYADILTFSSRLHYVDILTVDGKCYEQMSTLNKIIVHLPSEFIRTHRSYIVNMAHIYRITSGTIELSNHLTTQIARSYSKDVISAFAKYTTRFDTSGDFEMLYIDSIWEYIVNFLELALFIIFIHKKLRIRANYKHQAVLMFLFVSFQFAVLCTLNKMGISSYSTLMSSCVLDIGYAVLFYRDSIIRRIFWGFSYSIICLVAEQISFFIPVTLYKGASLELLLGGTLRKPYTMLYLAMIAVFVLLFHSIGNKDISLSPFQKVAYIFIAISGLAIGHYILRLTLESVDKFGDSSFSARLSLVDLFFIILFLVLMLYIYQLGYSKEENIRLLEEQKIYELERTEFNSLSETTERLRKMKHDMQIYVDAINVLAKDKKWDELIAYTEQYHNTLATTQSAIATGNIAIDCILTAKLDYAEKHGIKTEYSIMAPENFPLDSVELSSILGNIWNNSIEAGERLIISDPTEHPYIYFYIKPYQNMILIHIENNYDGVIKGSIDGDILSVKQGKEHGLGIRRVKELVEKADGVLQITSDNKIFSVHIMIPDKENNKLLMHFKKSVLKNHLLYSIITLMAIAMLFPITAFAQAYVQTWDLVDSGKHLDYDGNSTYMSYINTGAATWNAYKSGVIRKDSAFVVEDVYVSDVNASNGWAGMTYSSGKIELNTYYMSGYSNSKKQNVATHELGHALGLDHSTSTDVMDAAITGHTSTQALSQNDKDSYDAAYNNYMKKSSIYGILSIVLIVGMFFTGCASKNNASQLNTNVSNLPIHQMHASFVYDTDNIREAVGICDYVFVAKVVSCDGTEYRNVITTEDEKGNPKEVGSPYTNYTIQVLENIKGELITDKPIPIVKQGGISEKQDAIYLFENDSLPSENSIYIFLAYAQEDGSLLISGPNSNVMCNDSNMYSINSVSEEKSVTEYDEFITYKDANDNEIIPVDRERYKSIYETDNNMDNKQVNKAPQKSARLVLQAVTAIARSNANSLCRGLLYEPKVPTQLKKMMLKSLKQKIAKVGIGLFCAGCVFLSSAAYSQAASYTAYALKLNKTNNFTSMHAKTTSDDYITNEVTAITNTSYANFWAVNNSKSKISNKYKQGVGTGSCNLIFTKSGYNSTNTQVGMGMENYQSQLSTAFVSGNVDFRMILNIASYILCVKNDIGKSYQFIRSANENFVLQGTEAAYIPYIMYLLLPVYATIIASLSLIREEKSNSSILLIQRIGKKKYLAGKLFGILIVTFLTITIPMLINLLLCHLTYPIHGYDSAWGEPDYAIGLVSYNADNFLDMVRLQHPTLYNLIYIFNYGIFGSGLAILAYALSYYNKMKVLYFAKIPGALFIFYIVFNLIVSVFGLNEFSIQGYIMPNVHGNIIGEIVLILLIFGLSIGIIQRKIKNYEVIMKLYKKKILNVNVGKCLLVSLITFVIRYFYANVYLGFHNSLVTITEGVRSQIYFGGILIDHSFDLISLSFFAILFILEICYLTMDLFNDANDNMVILLPRYGKKHIIYKDILIKMILRDCIVVVSDYLFFLFVEHTSNGLEDFKVIFMLLIEIFHLQMISYLFSFWKDSIIGYIVAFIVFFIPVMVCGFYFSMGNVIWKIWHYSLLHIPLFNWHNKLIIYYVEENYEWTTSNIDLLNFKSSCLISVISSAVLVWIGKFLCEKKQILMNLYVKSISKSIKGEKVLDDISYTFESGKIYGIYGKNGSGKTMLLRAIAGFINTDKGYIKYNHKALHKDMDVLPDLGAVIENISFWSMYSGFENLKMLSNIKGIVSDEEIYEIMIYFGLDPKSKKKVNKYSLGMRQKLALCQALMEHPKILLLDEPTNALDQHSIDLFRERILEEKKNDTITILTSHNKEDIEILADEKICMEFGKIKELMMKKFVLTICVVIICMVTALFYGKTGIKTTTGVHDPDIALSENTAMEIFYTGGQKTSYFNNESNYSLDDMEKDSSLIARITVTNSREMSLRSTKTMVKIEEIYKDNSANLSVGDCIYIIEPVSFVRGEEFYTNGWQYLKTEDTYLIFLKNLGCIDGYKYTKEEENSFMPVSEIYSKRNLTHDESCVVFDSAETLYSSISMFAFLTSEKTIVDNYEKIWKNITNSGKYEMNKKKLAKSVVGIALIVSVAILIVVCVGKIKHIQNKKNIIGTWKNANAEEVFTFQENGGLVVNKDMPELGITCGNALYSISSSNMIFVEQRDNSVNFEIEVDQNELTIFFMGHKYWELTKMNIVHAEYNKYHNIIDINYYNGYILRIDCGKAEDGLITTPNSQRMLDALAIDNPLEYARLYLDSEMQDWVNAMNMEWYSTMNNSLAEVRPELVPEWSEKNLPLKPDEITFGSNKKVWWRGACGHEWQTSVKARSNGEKCPICSGARVIAGINDLATLEPLLVKQWSKKNKIKPTEVSIGSHKKVIWRCEKGHEWEAAVKSRTINKTGCPYCSHNKVLAGFNDLATLLPDIAAEWSDRNCPTLPTQVTVFANRKAWWKCKDCGREWNTLISTRSGGSKCPYCSGYIFLKGFNDLQTTHPEIASEWSEKNLPLKPDEVNAKSRKNVWWRCSKCGNEWKSVINARVKGTVCPVCAEREVLAGYNDLATTDGQLLSEWDYEQNKLKPTEVSRTSAKRAWWKCRHGHSWSMKINERTILKKGCRICEQEYLSLFPALAVSYYSNRKGLKAELGSDRLLGVPLETYIPSEKLAIESGSADENIEIMKAYMCKQRGIRLIKLPMKGTELDYANNLKKAFQSVHIFISSDTEEDVEIIKNTFERWRDSQMREKTYHLYLNEEERSRVIQSLIELKNNLAAQGRYTDAVDDVLCKVLEAKKKKLKIEYIMISVFQNSENSGYEYQVAPDMAMTVRMIMILLYGAGGVPGRGMSNCKTISVCNQKGGVGKTTTTVNLGVGLAMQGKKVLLIDADPQGDLTTCLGWQDTDGLGITLATKLTDVINETMTDPMVGILHHEEGVDLVPANLELSAMEFNLMNAMSRETTLKNYLSQVKNRYDYVIIDCMPSLGMVTLNALSAADSVIIPVQAQYLPAKGMTQLVQTISKVKKYINPDIKIDGMLLTLVDSRTNLAKSTVEALRANFGNQIRMYRTQIPIAVKAAETSSKGKSIYAYEPNSTVSKAYAEFTKEVLADGRKKERLHSHEARMAGRKSDFTLTKLDDLFTTQAQRDEEQLSKIRDIPLELIDDFPDHPFKVRDDEDMMQLVESVKERGVITPATVRQKEDGRYELVSGHRRKRACELAGFETLRSEIVDLNRDEATILMVESNFQRSEILPSEKAFAYKMRLEALSRQGKRTDLTSNPLGRKSDGKETAQIIGEQSGDSQTQVRRYIRLTNLVPELLEFVDEGRIKMRPAVELSYLDEDCQRDVVDEIDLNDATPSHDQTIRMRKLFNEGNLTTEAIHAVMSEEKPNQKEKIVLRGDRVRQLIPKNIPVSQTEDFVCKALEYYNKFLRNRAERDSRMIKSKFKRVTSLFLATLMCVTTFAGIGSTTAYAASGEKADVYMVDFPRDGDANYDGVWGHSNLTLKNGWHTGRSNFTNLKAIGSYSGNVAYCIEPGISLKVGQTMNKYDENYFNNLAANGVISGDEIRLFVGRILQYGYRGTISTSWRSQNEAAANSIAQAYATQLLIWETVIGERDANFNHVAASGCSNVKDVINAKHPLRNKIFSYYNSMVQSVQNHATIPSFCNKSSGSAKTIELEWNGSKYTSVRMAQFIPMDEQKIIFSNRFEKEKFEDYKTDLGTDSSVTPDFTEADDFLKFIQKNRRSVPSKERIADKDKFIKIVYELSNSFEIDADLIEFAEGYIANIYVDYACYTGYIKKLLAILFILADDISFLDGSKENADMLFSFTYHTHHIFLNNRETTDFSMKLDTIGKNIRKFRLARKLRQEDLAERTDLTTNYIGMVERGEKIPSLETFIKIVNALGVSSDMVLTDVLETGYTVKNSMLNEKLEKLVPEDRNRIYEVIDTLVKQSKQILPMNDIFRQIAKENGTTEKAVKEEMQFAIREAMKSAEPEAIAFWKAVAPDGKEPPIEKVIAMIALNVNNRMYNMKICYNKLQKLMIDNQMKRQDLMRAAEITSYAATKINKNEPVSLEVLMRICQVFHCDIGDICEVILDEDMRGVNVNMFYDDLNTEEQVSYLIKPILQVLQEAGGQLERSEIRDRISELDEHIAEFEQKLYTSNKTGNQYKKFDFKFNFAIKELSYVGLISYVKFNPKITLTQDGANVDLTDFDVKTEVRDKARSYWEEHSTKNKSKNKPVETLEVEDEENESTDDELLDDFKVKLQSAIANMSPAKFEQFSRALLTKMGVEFTNKGVQVSNDGGIDGYGYHVDADDFRTTRVVIQCKRFNSNPVSEPDINQFLGAMNKYQADYGVFITNSRFTNKAREAAREGTPITLIDGNDLIRLVIKYELYITPVTTYVLDGFYTEDMAKQKTYIAIDLKSFYASVECKERNRDPLTTNLVVADKSRTEKTICLAVSPSLKSYGIPGRPRLFEVVQKVKEANNNRRWKAPNRTFTGSSDDSTELNANPALEIDYIVAPPRMAYYLEYSTKIYSVYLKYIAPEDIFPYSIDEVFIDATNYLNTYQMTARELAMTMIQDVLKTTGITATAGIGTNMYLCKIAMDIVAKHIEPDKDGVRIAELDEMSYRRKLWSHRPITDFWRVGNGYAKKLEEHGLYTMGDIARCSIGKPNELYNEELLYKLFGINAELLIDHAWGYEPCTMEQVKAYKPETNSVCSGQVLHCPYDYEKAKLIVKEMTDQMVLDLVDKGLVTDQLVLTIGYDIENLSNPNLKYQYKGEVTIDRYGRKVPKHAHGTANLEKKTSSTRLITNAVMDLYDRIVDEHLLVRRITITANKLVDEKSVKQEDEYQQLDLFTDYEAQRKKQAEEEEKLERERRMQEAMLSIKKKFGKNAVLKGMNLEEGATAKDRNEQIGGHKAMGILEIVFNSRKFDLNDDVLMGFDNYFDKKSKDYNSFCLDEEDINPLQNFVAQIKSADSDSVIYVSTYGYEITNSKGEKSTYADALWIDTVLPISQIERYIEKSGVAEPSNISFVGDSDECGNYKVWIIAQEENNPHIIELTDRKKIDHMIILYWDMNEREKIIRLWFNMWIKKADLGIDNIFTDDVVYTESWSPKYENRKTVKHWFDEWNTRGSVLVWEIKQFFHQGNQTIVEWYFKSKMNNGNVEEFDGISLIVWTQDNKIKSLKEFGCNLHNYNPYRDSDIPVFREEKANWFMDEHSYDDIINLPNPTSKNHPRMSLHDRAAQFAPFAALTGHDAAIKETARLTDERLELSDEVIMKLNDQLNMIRDNIGTEQEISITYFVPDDKKSGGAYLTHSGIVKKIDEFERKLIMQDETVIPTEQISVIQGEMFKGLYEMETKPRILYLKKILEERTDEEHPLSTTQLINILNDEYGISAHRTTVTKDIAALQEFGMDIVTIHSTQSKYFVASRKLELPELKLLIDAVESSKFITKKKSETLIEKIHTMTSPGQVAKLKRNNYVVNRIKPDNEQIYYIIDAINDAINAGKQISFQYYDYTGLKKKVLKNKGEIYKLSPYKLLWCGDYYYVLGYSEKKSKVINFRVDRIASKPEILNKDIIPMPDDFDIENYTKEVFFMFSGEKVLVDLRCDNSLMKTMVDRFGEDVTTLAYDMTSFRVQTEVSASPTFFGWVFGFNGKVQILAPESVKEQYRQMIAQADEGMQQKENKRIVNMSVKELWEKYPLVIERYSPFVHLSIAQGEVIDDINRNEDKYAKRSSRTLDCYGYDDEMSSQFHKELAIMFDDPFERAEEERLTLQTLTSRQKHCFLGWMRRDSSETKRKILTVCVRLFLEQGYKNTTVSQIVDEAGVARGSMSKLLVAWHHFKTITTHRILVMQGCFKMGLYWQGLTHDLSKYSPTEFKTGVQYYQGDKSPNAAEREAKGYSESWLHHKGRNRHHYEYWTDVTKDRSLGIVGIKMPVKYVAEMFADRVAACKTYEKDRYTTMSPWRYYKRTKEYITIHPETRKLLERLLKMLAVKGEDEVYRYLQYLIRVKKTYMAKNKTSYNNKTSDCSNSTNSTNSTNSTNCRNSASDKAGHAAKSAYKNTADSMKNSEDSEDEYSQKNTYKNAYKNSRERMAFQLISAREAESLMDHWEYVVIDLRNDRDYRKGHMQGALNLPYEFLDHYIEKLPKNRRYILYCSHGGASMLAGRRMSEQGLDVLSISGGILSYRGRLFVMENNTFEYVVPCHFGMEAVLKREIMALGYEIVNVADGRVTFRGDEKAIARANIFLRTAERVLLCVGRFKAKTFDELFEATKAIPWGDYIPVNGKFWVKKASTAKSQLFSSSDIQSIVKKAIVERLKMTYRVDWFKEDGDEYPLRVFILKDEVTLALDTTGESLHKRGYRKLTGKAPVSETLAAALIMLTPWNKDRILVDPFCGSGTFPIEAAMIGANIAPGMNREFTAEAWKHLLPMKGWYDAVTEANDLICNDVEMRIQGYDIDGEVIKVAMANAREAGVDHLIHFQQRPVSELRHPKKYGFVITNPPYGERLEEKEALPALYTDIGNAFRHLDSWSYYVLTSYEDAERYIGRKADKNRKIYNGMIKTYFYQFMGPKPPKRVDNRRFNMKHLKRFIVLAMVLGIGGILLMRVPATQFRGQDSQELTRHYNLIKAKDINSRTISLYSDDRKVETSGNDQIWMSDDMTLMIPETMVNDLFQCTAARMDGDIIKLIKGQKTCEIDIQKNRVRTDDGWTEARIAEFDRHGNICLSVNYLADYFDYDYQWDDENNTAMLATPEDEPVSLPVRYDLRDYGRVSEVRDQGSWGTCWAFAALSALESSLLPDEKCEFSVDHLAMNNGFNADLDDGGDYNMALAYMTSWRGPVTEAQDPYGDGKYEDGLSAAVHLQDAVIINERDYSQIKQLIMQYGAVQSAIYSQPDIRSLSAYYNEENAAYYYPESQECNHDIDIIGWDDTYPKENFVTEPEKDGAFICKNSWGADFGQNGFFYISYEDPNIGVYGVSYTGVEDADNYDRIYQTDLLGWTGSIGYNEPMAWFSSVYQTDSKNTLRAAGFYATDAETYYDIYLVRDFEGIEDMDRRVFLQSGYIKDKGYYTIPLENPQPLEADQRFAVIVQIYTRDSMHPIAIEYVSNELTVEADISDGESYMSYNGSLWSHMEEASACNACLKAYTDLTPDQMQRIIFATTNENKMKEIREILADFPVEILSLKEAGIQADIDENGSSFEENAAIKAEAIERMTGAIVLADDSGLEIDYLNGEPGIYSARYMGEETSYHIKNANLIERLTGVPDGKRTARFVCCVAAAFPDRKTEVVRGTIEGRIGYKEEGENGFGYDPIFYVPEYGCTTASMSSETKNAISHRGKALQLIKPVIGTYLDTKGIMRVLLVSDSHGRNQNMEKVIRKVSPVDLLIHLGDLEGSEGYLEAIAPCPVEMVAGNNDFFSRLPREKVITIGRHQIFMTHGHNYYVNYGYGELRAAAKSRGCDYAFFGHIHRPVLDDTEEVTVVNPGSISLPRQDNRRPSYAILDVNRKGDFDIEIYYLMENEEREVRGMAVVWKRLRALAVFLLVLSMLESDGIEQEIMRISIGYCAEGGSRLVSYGLEEDRFEDQNFIPVIYMYDNEAEMMDALAEEEISIALLDGNEIVFDNKMTDNRIILWLKIDNQYDTVICVRKHLMEENLNTAICFTKACTDENGGNVKVVPYLQWLDYLRTAGYAEEDVMPYLAPDFVDEMLEERHFDRMMSTVLYEVKGNIAILTISREKALNALNSEVLNDLNAALDAVDVNAVRALIITGAGKKSFVAGADIGEMSTLTPEEGEAFGKKGNDVFRKIETFPIPVIAAVNGFALGGGNEICMSCDIRICSDNAIFGQPEAGLGITPGFGGTQRLARIIAPGLAKEIIYSTKNIDAAKAKEVGLVNEVYTQDELLPAAEKLANKIAKNAPIAVRACKKAINEGLDLPMDEAIVVEEKLFGSCFKTHDQIEGMDAFLTKRKEKNFINAMKVGVIGAGTMGSGIAQAFAQTEGYEVVLCDINEAFAEKGKEKIAKGLQKKVARGKLSEEEAEAIIGKITTGLRDKCADCDLIVEAAFEDMAIKHEMFKELDTLCKPETIFATNTSSLSITEIGAGVNRPVIGMHFFNPAPVMKLIEVIAGLNTPEETVEKIKEISVSIGKTPVQVKEAAGFVVNRILIPMINEAVGIYADGVADVEGIDTAMKLGANHPMGPLALGDLIGLDICLAIMNVLYTETGDPKYRPHPLLKKMVRGGKLGQKTGEGFYNYKKMNERRIELEGEIERMKQRLSYNIKRYRKLSRVSQQALADMCGLHRTYISDLENAKCNPTLSVMMVLADCLNVQLEDLLKEMVRAIVGANWGDEGKGKITDMLAEDSDIIIRFQGGSNAGHTIINDYGKFALHLLPSGVFYNHTTSVIGNGVALNIPYLIEELESLTSRNVPMPKILVSDRAQILMPYHMLLDAYEEERLGGKSFGSTKSGIAPFYSDKYAKIGFQVSELFDEEGLKEKVYRVVETKNVLIEHLYHKEKLDPEEIYQTLLGYRDMIKPYVCDTSAFLHQALKENKRILLEGQLGSLKDPDFGIYPMVTSSSTLASYGAIGAGIPGYEIKDVITVVKAYSSAVGAGEFVSEIFGEEADELRKRGGDGGEFGATTGRPRRMGWFDAVATRYGCRVQGATEVALTVLDVLGYLDELPVCIGYEIDGEVTRDFPTTRLLKKAKPVYTTLPGWKCDIRGITKYEDLPENCRNYIEFIEKELEVPITMVSNGPGRHEIIKRKMFDEMYYEENNIIPKEEYKHIIDTLHKEKKFRPARISVVRKVFFNREINYLTDAVSVNQENTDSYCVMMTDWDTDHLILEKKSKREGLISKSYTRLSEEEFERILDGDYEWMASARESIFRDFYLQLTINQLRPGVVVDYERQAFRMNSKKEYMIFDLSIRSTYLFTKDTVLSPLLEQTERLEQNRVVVTYKQMAELPGFIYRMTGIKQKHQCLLPEFAMKEKIQLLSRGVFEYENPEIEVSEKEIALEVEAGSHYSGTIQLNSRNHIEIRAMIFSSNKWMQCLESTVIGTTGCIHYVFDTQALETGEVCEGCFYIVSNGGEITIPYRVKVCAPFCDSSMGPMNDLDQFASLARDNWSEALKIFKTPEFGRVFLHNKKNRRIYAALIKGSDMSLAMEEFLCTVKRKQAVQMSVSQDLIEFDNLEHPVSEHLLIEKNQWGHVNIHVSTEGDFLSVYKKTVTDEDFLGSYYQLEYNIVPGMHTVASGKIILETLNQRIVVPVCCRREKARDVDFIERKTLKASWMHLCRLYLKYALHQIDRNQMIGYAREDINGCLNNSRDILFKVVEADFLREEGKNEEAQKILDGINGRELRYRSAVAYSYFLYVNALCRQDEHYTEYVRDSIQFYEEGQYHDRWELVYMLMKLDAREEQHQLKVLRQTKALYDRHLMGGLMYLEAVKIINKDPSLIREMGAFEISLFLWGIRHDCLNRETIFRFADLVLRMHVYHGQCLHAMIEMCSLYETKNLLSAVLHLLILGEKKDPIYHQWYQLGIKSSIKMQGLYEYYMATLDMKNCRELPVPVLIYFQYDNRLQLKQKAFLFRYVIEHEQWLGKLFEAYDGIIKAFTFEQLQKGVINEDIAVLYHHYLTKEAMTPHVVKAMPAIIFKHHIHCDHPGIVGVIIDYSELGEEKYYPLDQGDAYVDLYMDDYRIVLVDTRGGRYMSTIPYTIDRLMDAGRYIRICYEQGRDNKMLVLNRSERALKYQMMDDVSIETYKCVLSLPDVSRHYQKTILKNLIDYYYDNYEGETLEKYLLQLDIQLLGHAERSHIIEYFIQRGLFDKAYEAIREYGYEGIQDKRIMRLCSRVIREKNFAKDELLVELAYFAFSNGKYDETILQYLIMFYAGTTEQLYAIWKAAGDFEVPAEQLEERLLCEILFTENHVAEGCDVFVSYYHTHPGHRLIRAFLGYYGYHYLVHGQTSGEKIFQIMEIELDQVENARDVCALALLQYYSEADHVEPEFYEKLQQEVAAFMDKGILLPFFRKYAGNAEVPEELADFLYAEYHTSPKAAVTIHYRLHQEFETEWINEPMRHILGGIFIRTFRLFAGEEIEYYISEQDENGEKTGEKHLLQREEAMDAWPETGVELLNRMNHAIQTEDSQAVNEMICSYERINEMTEQLFELKMERQRLMVGYDLCADYSQISYYNTEKEEPDSVNFDGQNEIPTVLCRLFSNGEWLAGQQALKAAEAGNGVLVRDFIVRIADDPMVDVAGERMEKAGLIGIFFQKTLKALETVCEGAEVGFITITMEDVDLATADALKRAAASMGIGAQLLALESHRLSYEYYALSQRRELWTHDVGLFEYDRRGLRYHHLSVSWKHHPPVVTAETTMLNQYLDGHELADPVPPEMDRQFLEAIKEVSARRMISTYYLMGEGFSGAESGKSWMNLSLKQLCAMKRHVFAGQNLYARGACYHSFDQGSFGRKPGFIAANAGLLTKDIYLRSVHKHAPQKLILAAAGTPWYSAVSRKAIIIDGQEQLIIRMRDPLTNFEQTAVMTLDALPQRPPKTTKLLIETSFQSETDCHIRVTDMGFGEIFAATGKVWEMHFDIGEASEASGQSAKEAVIEATIPQEVFPLDMKMSGTRIFSLEELCWYLSKNVYITTYDLFDEKMFFWMDKITGSHSLALALFNYKSAGKPLKEIVRLLLNAVDYLDNGEIARIYNKLTEMEHQNPLEQMRLAADNYNRYGHYMAALKNYHHVVYQMTHDYDSEMTRQFKADTWHNMGMVFLRLHNIKCAAECMKRAFELVKTQDFLAPYMYVLELLGDHEKILTLIRQEDIPTDISDAVLNRYKEAEHLCEHSEENRKIQDGLTLGNGQTTAKYWDFVRDYLNRQKKNYDLTMERHYYTQYSEHLQREMHVLVYGYTGVPIIVFPCQDSMCDNFENFGMIDVLQDYIDGGKIQLFSVDTVDKESWSDTWGDKGYRAWVQECYYRYIVDEVLPMVHEINGTGQLPLTLGCSLGATHAAIVFFRRPDLFGGVLGMSGCYDATYFTDGWCDENLYNNSPVHFLENMPSDHPYIQLYNERKIILCVGQGNWESEGIRTTGQMADIFYRKGIHGWTDFWGYDVDHDWPWWKKQIRYFLPFLVDMEMEKTYNPAAIEEKIYDRWLQKKYFHAEVDRSKKPFTIVMPPPNITGQLHMGHALDNTMQDILIRCKRMQGYEALWQPGTDHASIATEVKIINKLKEEGISKEELGREGFLEKAWEWKEEYGGRIIKQLKKLGSSADWDRERFTMDEGCSKAVEEVFCKLHEKGYIYKGSRIINWCPVCKTSISDAEVEHVEQVGHFWHIKYPVAGEPGRFIEIATTRPETLLGDTAVAVHPEDERYMDLIGKNVILPLVGREIPVVGDLHADKDKGTGAVKITPAHDPNDFEVGKRHNLPEINVMNDDGTINKLGGKYAGLDRYEARKQIVADLDAQGYLCGIEDITHAVGTHDRCKTTVEPMIKPQWFVAMEEMAKPAINAIKTGELKFVPESYSKTYLHWLENIRDWCISRQLWWGHRIPAYYCDECGEIVVSKGMPSVCPKCGCTHFTQDPDTLDTWFSSALWPFSTLGWPEKTEELDYFYPTDVLVTGYDIIFFWVIRMVFSGYEQTGKAPFHTVLIHGLVRDSQGRKMSKSLGNGIDPLEVIDKYGADALRLTLITGNAPGNDMRFYWERVESSRNFANKVWNASRFMLMNFEQAAEKGISIDGVSLADLTQADKWILSKMNRLTKDVTENIDKYELGIAVSKIYDFIWEEFCDWYIEMVKPRLYNDEDKTKAAALWTLKTVLINALKLLHPYMPFITEEIFCNVQNEEESIMISKWPEYKDEWNFEEDEKAVELIKEAVRGIRNTRTGMNVPPSRKAKVFVVSESEEVRNIFENSKTFFATLGYASEVAVQSDKTGIAEDAVSVLIHQAALYMPFADLVDIDKEIERLTKEEDKMNKEIKRAQGMLSNPKFVDKAPADKVQAEKDKLEKYTQMLAQIQERLAALKMNYAEAEEYINQIPRFSKVKSEENVDEILALFGHPEKKFAYIHVAGTNGKGSVCAFLDSMLRMAGKKTGLFTSPHLITTTERMKINGQNISEEAFTEIFEELLHVVKVREKAGHLHPTYFEWLYLMAMLWFGRQGIEYGIIETGLGGRLDATNHITQPVLTIITSISYDHMEILGSTLTEIAGEKAGILKSGVPVICDGSEPEAMAVIRKRAAILHCPLKVIEPEQVKILLNRGKNIDFLLQDRYDNKSYRIHVQTEAVYQTMNGSLAWMAVKELQKQDSELQQTEDGVFLEGMAHMHWPGRLEELLPGVYVDGAHNVGGIRKLRESIAASFAGRPVWLLFAVASDKDYGEMIRILCTIPELKGVTVTEIENYRRTDLETVASIFRKNWHGYVGHSYNINEAITTSEQQAAKYPNAVLICAGSLYLAGSVIEALQRMINFEEELKKFKPSLEIDQAEEAIYKNDLRDVTDILEDMMKEVKIASGNKRFMNCIKCNMPLENVYVCPHCGHVDKVAKKIIYSSNWHYNQGLAKAKVRDLSGAVTSLSQSLKYNKRNTDARNLLGLIYYQMGEIVAALSEWVISVHFQERNNIAADYIQAIQNNPAKLKAANKVIQKYNLALSYMQENNADLAIIELKRVVNMSPTYIRAYQLLGLLYMQRKQYAAARKVLMRAVKVDRNNMTTLRYLKEVNRLHGKPEKNQHGRKEEFMQINDPNPIVIEEGSGQNYADYNTGFLSFINILIGIVIGAAVIWLLIVPSITKTKASEYNQAVVEYSAQISERNKNIDDLQNQITDLKSQLAQYETTASNTVDDAGASEQKLIEAASNYLQQNLQDAGMLIAEIEPAAITNAQEKKIYNIIKEATKSSVTETLYANGKDSFDKKDYVGAIDGMTKVLRMDDSYSYAVFYMGRSYQLLGDTGNAAGYYKRLIQSYPNSDLIDDARKYLNQLGDTSSIDAVDISSSDTSDTTDSSDNSSDSSDNSSDSGDNSNDSSDNSNNSSDNTGDNTGDGLSDNGDGSGEMEYRIVRSILFVVPGREIDHFQAETIIRYTEGLLRQQCFRLLVFDLADTVFMDSAGVGMMIGLYREIRAWGGAVYIIRMQSGVRRIYRMAGLHKIIPCYEDEAQFLAAVEGGGAGDERMRDKMRLTMNAIAENEYFARVTVAAFSAKMDPTMEELSDIKTAVSEAVTNAVVHGYDGKGGSVEIRAEIQDEWLEVEIEDEGIGMDDVELAMEPLYTSRPETNHAGMGFTFMEAFMDELEVTSTSGQGTKVKMRKKIERPAVLRSKKRSVRMTDVREQLQRAQAGDKEARNYLVQENIGLVKHIVSRYTARGVEKEDLFQIGMIGLLKAIDYFDLSYDVRFSTYAVPMIAGEIRRFMRDNGAIKVSRSIKDNRAAVNRSREQLLEKLGREPTLSEIVKDVGMSMEDVLLAVNSGQEVASLQQTIYDGDGSSIRLMDKLSARSGEGDAALDRMMLADSLSALDQREREIIVLRFYYDQTQSQIAKRMGVSQVQVSRLEKRILRKMKMYICMKAESTTGDETAKTQKQVVIYLLADDYIEVEVQPLTMGDLCEIVGTDRKVADFVKQMSVTGLQPQETGRSVISVLMLVEVITVQVRKQFAGIQCQCVLLGAEQLIVEWGGKKTAPWWVTILKTVCVSLIILTGSAFTIMTYDQDVDVAGVFGRIYQLFVGHVPTQPGILEAAYAFGVAAGILLFFNPFVSAAKRKAPSPVEIEMEKYESDIRDTIVKIDNRLNKRMNFKERDFIPMLFGGDINTYSVARAFYERYKVKSYTFGKFATGPSYQSRIIEYTPNPKIDTDEVFMKTVKSFCSKHADKTVVLVGCGDSYVALISKHKNELPKNTIAPYIDFDLMNSLQQKETFYKLCEKHGVDYPGTIIHNKEMGHDFEMNFPFPVILKPSDSIQYWEHPFDTQKKVYTIKDKKELDQVLDDIYGAGYTGKLIIQDMIPGNDEYMRVLTSYSDHNGKVKMMCLGHVLLEEHTPHGLGNHAVIITEPNKELMMRVKDLLEELHYVGFSNFDIKYDRRDGKFKFFEINTRQGRSNYYVTGSGFNVAEYIVEDFVYGKELPLRYAKEEHLWMVVPKAVAFKYVKDPALKAKMKKLIKEKKVVNPSFMKGDLGMPRLARMIKTHLSHFEKYKKYYSMKNYTLKEYADLLSSVDMLAEAEMMGRDETVITYLTYDSRAVTPGTLFICKGAAFKEQYLENAIQAGAVAYVSEVQYETETKVPCLIVKDIRKAMPPLAEMYFNKAWQELTVIGFGGTKGKSTSAYYMKAIVDDYMAATGGKESAVLSSIDIYDGVIRQESHITTPESVELHEHMRHAVDSGITYLEMEVSSQALKYDRVNNMQFDVAVYLNISEDHISPIEHKDFEDYISSKMKMFALAKQAVVNLDADFVERALKAAEDAGSFKTFSLKDPSADFYGYNIHKEDGEIIFSVKCDKFDETFSLTMPGLFNVENAVAVVAAATLLNIPLEYIKSGLHRARSSGRMELYTSADKRVTAVVDYAHNKLSFEKLFGSTREEYPDHDIVAIFGCPGYKAYIRRKDLGLIAGEYSKKVYLVAEDPGKEPVQQISEDIAQYVAQKNCPYEIIEDRGVAIHKAIMECKRPTVLLITGKGNETRQKYGTIYADCRTDVEYVKEYLEEYNHSPSHVLENQNLDMKMRKVLSALLVAACTLSLAACGSSSSKSETTGASGETAAGSANTAKVIDVDLTSEEYAFGVDKTQPELLEQTNTFIQKIKDDGTLDAICAKYFGDGEPEAVESAELDSSKDQLVVATNAAFEPFEYTKGDQYYGIDMEIAKLLADELGKELVIQNMDFDAVCLSVSQQKCDIAMAGLTINEERQEYVTFTDSYYQASQRLIVPSADTTFDECKTADEVAAKLGELSNSDKIGVQAGTTGQYYVEGSDDWDFPGLPAECVTYKSGSLAVQDMLNGNIKYVIIDAAPAAAITASINAMQMGNFDQKVNKFIEIFWEQNGYNKVLQGLQNTLMIAIAGLIIGIIIGTIIATVRVLPKYKTLPKVLNAICSFYVALFRGTPMVVQLLVFYYVLLPIIGLKITGVQVAMMVFGLNSGAYISEIMRSGIQSVDPGQMEAGRAVGLSFGTSMIKIVIPQAVKNILPTLGNEFISLIKETSVVSFVGAADLYVAFNYIGSNSYEFMVPYLVMALIYIVLVLIISLLIKLMERSLKKSDRRNMIDVINLKKSFGSVEVLKGINMTINKGDIVAIIGPSGSGKSTFLRCLNCMEDPTSGQIIFNGVDIADMKVDINIHRRKMGMVFQHFNLFNNKTVLENIMLAPVYTRCQELKKAKRHNRLAAFGKKEQIPVTTTKEQIKKEAREQAMNLLKRIGLEDKANVYPSTLSGGQKQRIAIVRALAMNPDVILFDEPTSALDPEMVGEVLELMKQLAEEGMTMVVVTHEMGFAREVASRVVFIDEGVIKEEAEPKEFFANPKDARLKEFLSKVLMPYDILETTKNKANIFLENGGEKMFWILVIGIVIVYCVLKGEDNSGSSSNKRSSTTTSKAQAAKTLNVPYPYSTIKRMEVPVYIWENGINNKIATDILAKKIIYDEGNHLLVLHCGFGFENRNNFEMHWENAVFYDANGRMVDVQHKGCRGIVPKYDEFGEHPETIVEYELDMTKADEMRKMAAQNKKTKTEKVDDYEETLNKTYAKFICTVEDSANKGISKGYAAEIPRMLVPGKYTFEWKNKGLFTDYYVAKMTSLGERFLKDFKAKAEKDGFQIEYKLMYSGVEHTFGEKIFKKKNSAGYVYTPTVQVFYRLMFWILLIGIIIVSCVLKEEDSSGSSSDKHSSTVTSKTRATKTLNVPYPYSAIKRMEVPVYIWETGIKNKIPTDIGKRKLDMLRDIICLYYIVFIIPFASLKAQTSYEKCCIPPLFDLMARQKWNLNTIYISERLKACLRPVTCCALTTVVAPMGYGKTTAINWFLDEQGKMDALCLIRISVYSDNLAIFWKSVQVAFKRAGFDFLEDYACPEDVAGAGLLIEDMCHELSKTGSCYIFIDDFHLLTDSRASAFLCMLARRLSGNVHLIVAGRNQFLSSADILCLGGKVYQIGVEQLRLNRKELAVYVKRCGIKLSEKQTETLFYSSEGWFSAVYLNLQIFLERGVLPDGASDIYAAFTRAMIEPLSAKQREFLAVMGIADEFSAEMAVFVTEDEEVRAMLNILTEQNAFVKCLADGVTFRFHHMMKECANRVFAALDEEKQAFYLNRFGLWYEQHSQYLHAMDVYRRSKNYDAFLRVVKNDAGILLASLNAQDVMNVLAECPVSILKAHPLAILVLMRSMFNWRLIPKMMELKVLLMEVVEENAALSDEERGNLLGECDLIMSFLCYNDIGAMSQLHRRASSQMSRPAISIQNNGGWTFGSPSVLMMFYRGPGQLESELAQMDECMPHYYKITCGHGQGAEKIMRAEAAFVQGRFADAQIELERAYAQIEGNGQENMALCCDFLAWRLALAKEMKPHCSLERRRTELLRHHNAAWLNIWSSISAYYYALLGESEKIPPIFGEHRLSDINMLAPGRPMMLLIENQVYLAQKNYAKVIGRSDGQLSVCEGMHYRLVALHIRIQTAAAYEAMGKWQEAEQMLTQAILEAETDYLMLPFVENYRYLKKLLLRCQKQESLFVRYLIQMGEMYEMRRECLRKEAHRPEVLAVLTDKEYEMVLLINQHQTNREIAEKMFLSEGSVKQYVKQIYSKLQIEGDTRTKRKQLLQLLEENSMSYVIIGLIIVACIIHSVLKKSKETADQAVNDAIVPGVMNTLFDDVQMHPEGHLLDVKGSNIPLQTYSYLNSSGNICFRYQGHPAELCSITLTEVNDYIDENNDMRQTNEQEIYRGQWMCCELGETFPTGFTFWPRGKLDKIFRTKTIKTGYEAFDKRFNLSCDNEEWVMYFLNQDRMARILELTQTAFGEFAVCLHGDGKLDLAVHSGHHFFEVGRDRNNPEALKQRYTRELKWCRDMLDVFISMSFCDELRKIEWENSYSNKKEEIIHREVEGLITGIKVLSRNAERDGKRNLTGYYDQFYWDTTDYFIQPSVSETGFQRYTMLSFLKGYSQYEAMNIRQEIVKRLHQRLAEMGYRNVQLRIDEVAQRENKKFFASKTGVTLYYLWLNISWMAYFRRKFYYNENNMPDGLKPIYAGFDLLQSHPLFSQLDGTIAVRNAHLSNHSSLACVTKNGEISVNIHARLNAAEWAYVMAHHLLHLAFGHFDKNKMPSAAEIYPLVWNKACDIYVTRFLTDIGFSGSLFQDPSAFYPIKLNDERKIYEYLLDTEGISPKQTYGLNTSSTCDMFGISSPIVYKKGEQNEYTETFAAAINHSIKKVVIHAGGHDASNKKDTVISKASEWFLSHYPLLGGLASSFKIIEDIDLCRRYEIHIAAVDAVHGEIYTNPSCCLTLEEWKFVLAHEYLHAGLCHHERCQGRDHYLWNIACDYVINDWLLAMHIGSMPEEDLLYDESLHNMSAEAIYDLIVKKMRKFKKHATFRGYGKGDLFGDQGPRFKGLHKGISLDEFFKNALREGLDYHTTHSRGYLPAGLIEEIRALSMPPIPWEVQLGRWFDEQFPPLEKHRTYVRPSRRQGSTPNIPRPSYILQEKELKSRTFGVVIDTSGSMCSAQIGLALGAAASYAAAKDVPFVRIIFCDAEATDAGYMAPEDIAGRVEITGRGGTILQPGIDALEKAKDFPPSGPILVITDGYIEDNLKIRRKHAFLIPNGNRLPFRPKGKVFYMENKEPKESYMNLPITVTQDGLLEILLNVAPSRPVFIWGAPGIGKSALVEQFASEIGLPCVSLLGSQLAPEDIIGIPQIKGETSEFLPPKMIARKEPYVLFLDELNACSQEVQKAFYSLIHERRIGEYHLPEGSIVVGAGNRIQDSAIVKTMSSALINRMFHVQMKADARQWIKWAQRSQLHPWVIDYIIQRPDHLFSEAPKTEEPFSTPRSWHMLSDALTEYGAGKRELSSHVLKMLVYGCLTPSHAGMFLAYIKSLANHHMLDDIIAEKTKWPSKAEDRDILYFLAQSFRARLISELPKSKQDISGNMLSFVYRAKRMIKDLSTINFEIAQMVVASDDNAALPDWFMIEVIRDLPRLVNGKMSKYRETPCKFYICRGECSKGRAAEHKTYCQHCNKYYPRAKVRHINQKKRYNEQQRSQITAMNGKNIELLVENDRSWKFEWIFKQAITCGNVMACLEMMSQENTYYNRKYKDSLFRFIFNNKEAALSLYNAINDSDYQETDAMEFYTMNDFLYMGMKNDLSFLLDWNLNMFEHQSSYNPNMPLRGLIYTSAALKKFIEKNRLDMYSSKLLTIPVPRYYVFYNGLKKAADEVILKLTDSMAGTNASKVSSAEFTAHMININAGHSAQIMERCPLLHQYSLFVAALRKKISDGLSLGDAIEETITECIEKDILADILREHRAEVTDMLFKEYDSAAHIASEKEISYEEGFEDGLRQAEQDITKEKERADKLLTSLILSYHAQNKSPEEIAALCEQSIDFVLDVLKKHNLMRTAVEKALEELVDVVPAGADGFYYQGQELKDKKCKEVEAFKGIDTLHKLYAVLRKSWSSITAYKSCQSEWVSEDPSYGQCAITATLVYDMFGGSIHRIRVEGGGTHYFNKITGQYVDLTREQFDLYNIEVAYEPNETMQREYCCKNPDTNARYRQLQRNIIAYLKNNEDMKYYISDLHLFHENAIAFDPRPFASLQEMHDTILKNWNDRVTNGDMVYILGDVSMRGKKEELIAFVAQLKGRKVLIKGNHDDVSDYRYQQLFHEICDYKEMHDTIGKEHYSLVLSHYPIFSWRNMGRGRILLYGHTHESEEDRFYQKCLSEMRANDCRHVYEAEELRAYNVGCMRDYMNYTPRTLEEILNSRSKVMIYLSSFALSDKKVKNPNLYPYSVFQDKDCDPFVFAPITILYGDNGCGKSTLLNIIAQKINAKGYETYAYGQYYIQNYVEECRFDTGEDDTGRNLSIPAGSLYMKSEDVLYEIKKIQQEEALEQGYVYEQVRRKGLRKDVAQEMFRSTNGRSWSTMQILKFAQEKYSNGETAMQMLTDILEPDNLYLLDEPEVSLSPQNQVKLAEEINQCARFLGCQFIIATHSPFMLGTLQAKIYNLESTEVEEAKWYELKNVRYFYEFFDKNRKYFVRMFELYGCPTHYGVGAKGLIKSIDYLTENFKNLQMNKVPEITCNGPFRANLKNIESVCATCEGIAKQGYHILTSGHRPLMIAGDHSAAMGSVSATSVYTKGETGLIWIDAHPDINTDKTTVTGNIHGMPVAALLGLGEPSLTHFLDDSIKLKSGNIVMLGLRDIDPPEAEILKEHHIRYYKWDYIMEHGLQNCLNESIDYLSHCPAVHVSFDIDSMDPKLMPGVSVPVPEGFNEDDVFLMMDELLTRLPVQAMDIVEFNHELDKDDITAGFVSRLVEHVQGLMILKALFERIPAVLCQGSWDTDIASIAMCSKEVTNNSLFICIKGMEQDGHQYIQEAAERGAAACLVEETFWKKSASVHGNLKQAEKKTSAYEELKLPEQMTIVSVQNTREAAAWAAAAFYRYPSKELKVIGITGTKGKTSTTFMIRDILEAAGYKTGLLGTIDYEIGEEKKRAERTTPEAIDIQRYLRKMADSGCRFAVMEVSSQGLKLHRSDGILFDVGVFTNLGRDHIGPKEHKDMAEYAHYKSLLFQKCCFGIGNIDDPYYREIFKDASCQVCTYSCRQKADVQASDIMLVNRNGQLGTFFKVNGEEYAVSAPGEFSVYNAVAAITVCRHYGIDQEIIRKALKTIRVPGRVEVIDNDRGYLLLIDYAHNAMSMKNILETMRRYHPRQLWVLFGCGGGRSAARRREMGCVAGKYADFTVITSDNPRYEEPERIMQTIEEGMKETKGQYQMMVDRKEAMRFMLAQGRPGDILILAGKGHEQYQEIKGDYLPFNERKIAQEILADLDMKALILWGIGMSGGIAVAAGLFTFLVITGIPHRLMTITHTTAYGGWYEWMFVLGGALGNAVWLTDTAVKIPAGMFLAGAAGLLVGIFIGCLIGAIAEVLDALPVFFKRIGIRQGIGVVIFWMAVGKTLGAWMWYFILTMKQMESEKQTKNEKQTKGEKRMEDEKQAARKRRDKRYNDYVKQVTPKHNCLLNMLKAFVSGGFICVIGQMFSDWYGSMGLMKDEVSGYTTLSLILISVILTCLNWVGPITKFAGAGYLVPITGFANSVAACALEFKAEGEVFGVGCKIFTIAGPVILYGIVTSWVLGAIYWVVQMFAMYRSDPVNEEKGDRRFGGCPFVQPGAYILTNMQATAKQKQYNGNMCGIVGYTGKQSVAKQILDALELLEYRGYDSAGMAIVDETNGQVQIRKRAGRVADLEKAWKANPVNGICGIGHTRWATHGGVSDVNAHPHRAGRVTLVHNGIIENYEELKDHFGLADELISDTDSEVVAAVLNRFYTGDPHEALFQTVKCLKGTFALVVIFDDIPDVIFAIRNVSPIVAAYREDGTMLASDVAALGGQATSYMVVPEYHVVELHTDDIRVYNMKNELCEAEFLDIDWDTTRAGKGNYPFYMEKEIMEQPEAIKATLAPRYVDGHISLEADGVPDDVLKNCERVCVVACGTAMHAGLVAQSLIRSILRMHMDVEYASEFMYMDPVIDDKTLVLAISQSGETIDTLEALKYARSQGAKSIAVINVKGSSIARESDYVMYTYAGPEIAVASTKAYTTQMAALFALIGRMAVVRGAFNEEQEKAFVDALMQAPDAIQQVLDRKEEMHHIARGLLEAKDAFMLGRGLDYAILLEGALKLKEVSYIHTEAYASGELKHGTIALITEKTPVVALVTQERVRDKELSNIREVQSRGASVVVLVKDGIDLADADYTHVFTLPAMDDVAMAFPASAALQLLAYYVSMDRGLDVDKPRNLAKVVTVEMNIYEVQPIFSHPTHPFELTIDAPGSKSITNRALMLAALANGETLLKGALFSDDSRHFLQCLKDLGFDVVVDEPAHTVRVTGFGGRIPKETAAINVGSAGTAARFLTAMLGCAKGVWHLDASEQMKKRPMAALLNTLTDLGCRIDCHEKEGYFPFTIYSEGITASEATVDIGDSSQFLSALLMAAVMMDHDFAIHITGNHGFSYIHMTTAMMRQFGVEISVSDDQTWRIPGNAAYQSQDYQIEPDVSAAAYFYGMAVLSGGNVLVRHVHFDSLQGDVALLRTFEKMGCSAEDTPEGIRLTGPAQGRLHGIDIDMSSFSDQALTMAAIAPFADSPTFIRGIGHIRLQESDRMAAIVENLSRMGIHAAIQGNDIYIEPGTPHAATIETYDDHRVAMAFSLTGLRTPGIIISNPLCCRKTFENYFDVLDAICRNYLKMDHNLYHEIEDKAQILVDSLPYIRDFNQKIIIISFGCSNILTDEEEQEVMRDIALMKSIGMRPIVVHDTKMGHDKFRENKRIAKMIEFCGVKAVGICGIDLQTIHMTLDNDYIPVITPNDIDNEDTPILPEEAAKEIAVSTGAEKVLFLGKEDGIRDDEGHIISQMTRDEVVKMYVAGKFEGRLLQKVTYALQMIEQGVPRVHILGSKMAHALLVEIFSIIGVGTVIMPDKEHYYPHELKKRAAAAKMKERNSTAAISVKAPVIGLPRAMLYDRYEVLWKSFFSALGMKGIVSKPTNKAMIEAGSALAIDEACLSTKIYLGHIQSLIGKCDYILVPRISNFGLHRNMCTKFESLYDVVCNVFRNTDQKFVAYNVDALQKIDEEKAFVDLGTALGYDRKTAQKAYKRAKRNENEDWKKKVREEEALYKSQGIKVLIVAHSYVLGDAYIGQPVIDYLKGMEVTPIRADVVDRKEALKQSAKVSKTLKWELSRELVGSIQMHRDKVDGLILLSAFPCGPDSMVNEMIIRKFTGLPILNIVLDNQDGTAGLETRLESFTDILKLKKGVLMVANYNSVIRYFVECGLDAQFIMPPKMTRRTLEIGSRYSPDYVCAPFKSTLGSMIDALEAGADTLVMTMGLCRLGYYGELQEQIIRDLGYNFEMINLAEYTTGKNRDYLKALRRINPKMSLAKFTLAAAEGLKMVEYIDEIEAEYYRNCGFELNKGDYKKALDRFYLAMNMAKSKKDVEEGYREAKREFNRIPMDKPEQPLRVGIVGEYFTIMDPFSNLDLEQKLADMGVEVHRWMNITNRNLHYKGQKNLGVQIAEYCQYEMGPTSTANIWCAKNYAVNGFDGIIHVKSAGCTPEIDVMPILQNISADYKIPVLYLTYDSQTSDTGLETRVEAFYDMISMRKKVVMEEAYLGVDIGSISTKGVIIDKNYKILASEYIWTEGDPMGAARKLIELLEKQFDKEKYQIVATGTTGSARKLVGAMLGATMVKNEITAHAVGTTTLYPDVRTILEIGGQDSKIILVENGVAVDYAMNTLCAAGTGSFLSSQAKRLGVEVEDFGKIALTSKHPTQLAARCTVFAESDLVHKIQMGHTKEDIIAGLCRSVVNNYLNNVGKGKKIVSPVVFQGGVSKNIGVVEAFKKALGCDIIVDENGHLMGALGIAILAGKGNKKKVFDFSVEDMVFKTREINCGRCPNNCEIICVYRDDMLIDSWGNRCDKGALKAGTRTGVKMQKNISKTLHNFLIISLGNLIYTVAVAFFILPNNLITGGTTGLALFGQYMFHIPITAFVYVFNIAMFLLGAWVLGKAFALTTILSTFEYPFFLSILQLLSSRVGPLTDDMMLATLFAGAGIGIGLGLVIQAGASTGGMDIPPLVIEKKLGFPVSVSLYLFDFCILILQIFISDREQVLYGILLVVLYTVILDRLLINGKRQIQLKIISPEYQQINKKIQTDLDRGTTLLSIEGGYTGRPTYAVLTVVSPRELFKLQELIRATDPNAFITINEVREVRGRGFSLQKEYHMMNKKTEKKRISSCDICMNYTYDEDYECYTCEVDLDEDEMAHFMQDTYYNCPYFQMGDEYKIVRKQMMTDRKHIDPTIYTTRPTDERLEKENRVYDLLEELSIPFVRIDHDAMNTIDECQDVDKFLGVEICKNLFLCNSQKTKFYLLMMPGHKKFVTRDFCKQINSSRLSFAPPEYMEAYLDLTPGSASILGLMNDHEHHVQLVMDQEVVDQPLIGCHPCINTSSLTLATNDVLNKFLPYTNHDVLYVNLMSRRYDTVIFDLDGTLLNTLEDLADGVNAALKHFGRPERTLDEVRQFVGNGVLNLMDRAVPEGKEAKDFQAIYEWFKAYYAAHSEVKTRAYDGIPELLKQLQAEHFKMAIVSNKFHDAVCQLSRCYFGELLPVSIGENEAAGIRKKPAPDTVFTALERLGSTVEHAVYIGDSEVDAATARNAGMDCILVSWGFRERELLASYDPVAIADQPSDIWEILNRMIEKIQKRNGQMVAFDSVKILNAISRANMAVEDEVMEPADLSYLTQKVCSQLNPDEVVTVEHVQDVVEETLIRFDYAKTAKAYILYRAEHTKIRQTESDLMDIYSKLTYSSAMDEDIKRENANIDGDTAMGTMLKYGSEGAKYFVDNYVLPKDIAAAHINGDIHIHDKDFYMLTETCCQIDLIKLFKNGFSTGHGHLREPQSIISYAALACITIQANQNEMHGGQSIPNFDYAMADGVKKTYAKEYYTWLAASMRLEAGIDDGQAAAIIARAKSEITEELRIANMDAYGKALLALKPEEISEEDLKKAHDFAVAEALKTTEKQTHQAMEALIHNLNTMNSRAGAQVPFSSVNYGTDTSEEARMVIRNLLTATEDGLGGGETPIFPVQIFKVKEGVNFNPGDPNYDLFQLALKTSAQRLFPNFSFIDAPFNLQYYRPGDYNTEVAYMGCRTRVMGNVYDPTKEVTCGRGNLSFTSINLPRLGIEAHGDIDKFFKSLDDMIDLVIRQLMHRFKIQCSKVVRNYPFLMGQGIWIDSEHLDMDDSVAEVLKHGTLSVGFIGMAETLKALTGKHHGESEASQKLGLEIIGHMRNRMDEESRKTGLNFTLLATPAEGLSGRFVRIDQKKYGKIPGVTDREYYTNSFHVPVYYPIKAYKKIQLEAPYHALTNAGHISYVELDGDTCKNLKAFESVIRYMKEQGIGYGSVNHPVDRDPVCGYTGVIDDICPRCGRKEGEPVSLAFLKELRKKYPNVPVYTDEEIMAGGIEHDWRRTQECGCSSKMTGEELRNADAAANSAVVGEGVKFERIRRITGYLVGTTDRFNDAKRAEEHDRVKHGLNMDNWEAETLNISGIVDDSIVDGPGLRYTIFVQGCPHGCPECHNPQTHSFEENKRVTLGQLMSEIKENPLLYGVTFSGGEPFCQPGPLAILGQQIKKAGMHLMCYSGYTYEQLLKRAETEPDVTALLNVVDVLVDGPFLIVERDLELLYRGSRNQRLIDLKAMREKGDRSHVILWQEMMHHIYTGDGKGKTTAAVGLAVRCAGSGRRVLFTQFLKPAKSGEIEAMEDMENMQIWLCPAEFGFTWQMTDEEKEEAKDIYERYIWDITRMVLQGNFSMLVMDEVIGACNAGLVNEDELREMLEQFPDDMEVVLTGRNPSEQLCEWADYLTEMKKIKHPFDQGVKARKGIEYMFETLKGRIPKSIDEDEYRKFAVMVALLKQEDGLHVVFEKRAGGLKRQPGEICLPGGARDGNESSETNAIRETMEELKVSREQIHMIAQMDTLYTAYDNKVSVYLCELTDYEMTYNKDEVAEIFTVPLKFFMETEPEAYTNTVRLMPPEDFPFDQVPGGRNYHWRDGHKKVYFYYYKDWIIWGLTAYVLRGVVRTLKTELPAPDCENLVVMVATESVTIKVPVGMSKYLVTVNPETELTRNALLLYPYILNQTISHGRAAEILGIRKSELIDLYDKLGYSYFDMTLDDLDEELNTFRMLKKKETVVMIVVSDTTPLISLLKISRLDLLEKLFGEVLIPSAVFNELTTDERFQLEANQIRQEKFIVVKEVNNLESVSILKRATGLDQGESEAIVLTDELNAELLLMDEAKGRNVSSQMGLQIMGTIGILMAAYEEHELTSNEVKECIDGLKRAGRHIGQRHYHILLSRLNDMKNFTGKVTDVDNNGNPIKKKSSGKNGKKSGFKKPAAAKKSSGKKPLKDITAVMTKKPVRKIVEYYYFFNEEMDARKLQSAVGEKWFEKADIWPELNLMEVEMNFDSLIFQNAEECFIDPADQQWFEERGIKTKYQISYDTGDIEAVREVLHNIMAALGGRICSDTDDFEPSCTADTLDKLIMNSQQIAYFLEVVRQGSFTKAAQVLYTSQPSLSRQIARLEDEFGAELFCRSRTGAVLSPIGKKYYDLFVEMEKRLAELSMEAKRESLQLEKSVHIGVPEGWDVLPLIEKMEALLSVRGEELKMTFSAYSYRLLLSQLRNHQIDGCICPKGLIVPLEHMAFLDLPPLQNVLLYSRKHCPPENGQKYTVKDFRKEKLLLLEQEDTSIPKAYQLGFLQDKGIIPETKEYHNIDSILLDVSLDKGFAISDIWSRGAFDRNLSCLKLDQKMPICVAWPENHSFDEMRLFANLFKESMESLQMGLVEGKVIIVTGASSGIGEKTAEVLAAEGAKVVLAARRKEKLEDVANRIIAAGGEAYTVSGDVSVREDCDRIAEETVKKYGRIDVLVNNAGIGDKQMAITRCSDEWWRQIIAVNQDSVFYMSRAALVYMEKQGEGSIVNISSIGGVFANAGIAYSAAKAAVVAMTKNVAIQFAGKGIRCNAVCPGPTITPLLSSDEIATFDQEFMKTCNEHICRSVPKAEAVDQANAILYFASDLSKAVTGQALVVDYGCNLMWTADNWKDYEVIDTCGGEKLERWGQYILVRPDPQVIWNTPKTDKHWKKMNGHYHRSNKGGGEWEFFDLPEQWTIQYHHLGLSFNLKPFSFKHTGLFPEQAANWDWFSSIIKKANRPVKILNLFAYTGGATCAAAKADAHVTHVDASKGMVGWAKENAKLSGLPETSVRWIVDDCQKFVEREIRRGNHYDAIIMDPPSYGRGPKGEIWKIETSIYPFIQLCEKLLSDNPLFFLVNSYTTGLQPAVLTYMLSTAVKANHGGHVIADEVGLPVSGNGLVLPCGASGRWEHANGTNIRIWNYNLTEGQRWKLESTTTSTAAPKISGQTKPATMKAGSSFSIRGTVTSDLPLTEVTVGVYMKKNTTIAFTGDIGFDKYMEKKWEDEALLAPEITEFLTSADHVVANVEGPLVDNTATLTQAAEMRLMHTIHPDAEKVLRDIHADIWNLCNNHIMDAGQDGLALTLQEAKKFGAKTIGVGMNMTEAARPLILDEAGGIGLFAVGYQRGCKPAGEDKGGCLSWSEMEIIRSTIQEIKTKCRWCVVVAHGGEEFTAIPSPYTRERYHAYLEMGADLVVCHHPHVPMNYETVGDKMIFYSLGNFIFDTDYQRAQFNTEKGILLKLHFTEDRYSFEAFGLKINRENEHIESAPLPKIFVDIQEDDYNKLEPLAAKMFLAATKRQQLFLYPDKFKNATEAQWKAHFYEEKRSGRVPGEALDFQIIYPIAQEEAKGAWKECKLEAVKAYILEQMMERFILKELLEWKNSPYRKPLILKGVRQVGKTWILKEFGRCYYENTAYFNFDENEEYKQFFETTKDVSRILQNLMLASGQKIVPEKTLIIFDEVQDCPKVINSMKYFCENAPQYHIACAGSLLGIALAKPSSFPVGKVNFMQINPMTFSEFLIANGDENLAVYLESVDAIEPIPDAFFNPLYEKLKMYYITGGMPESVLMWTEARDVSAMQEALSNIISAYERDFAKHPDIKEFPKISMIWKSIPSQLARENKKFLYKVVKEGARAREYEDALQWLVDARLVHKIYRSSAPGLPVAAYDDLSAFKIYLVDVGLFRRLAKLAPTAFGDGNRLFTEFKGALTENFVLQTLITQFEVTPRYWSQSNPPYEVDFLIQRENDIFPVEVKSEANISSKSLKKFKEIFPDKVKLRVRFSLDNLKLDDDMLNIPLFMADQADRLIGLALEQKVANMKDTYSRGYKAAALVLLLIELAVLCLPVFGGSTAFLLLKGFWQHGNQLQHIAAPLLLLICPAISLFLLLKIQTSRTADTTDKFVEDLLPHNENTPADCGTLFFLSGPLTNQSFPLPAYTNVFLGRSSQLCQIVVNTADISRKHICLCYHAAQHTFVITDYSANGTYNTDGERLIANTSIEVPDGSVFYIGNKQTSFRLSAMSKFSIYLKNLIEDSGESISFIARSIEAERTSIHKALTDERILSYKVVQALARHFNLPVDKKKEFFRLYDILLQGEESYENRQAVCSLLNALSSIRFSMLPPPQVDSIELANRLIKGEYAVRNAIRNVLIYEATHTDKANFSMYVPEKLDLTMELMELWLAQCDYSVDALLCFYSNHTSGSKNIQLLRSVIPLCLASRGSYRPYYFCETPKAAALSPMSYYIITPHYLIQLSEDLSMAQIRDDTELIEFYQGFFRNLLECCDPLVRCNSNILEVLQEYISNTSPDSLQIMMPQPCTGRYITPKVIRKYMHNGSMPYKEMYNLVEHHFSVLQQINGTYQTVFTEKGLQDLITTRTMMDLPPQYVPPLENQDIRQMLRYLYDEIDRGSVQGMLVRPTSLQLPDYLSIYVHPKTGLHIYTTNAFVYGAYCCNIHIAEASICRIFYGFMQSLAGSNLVYSKADTLQLLAQHIAEMEVMSPFFLKGIFYRIILAYSVEAICDKKQKIISTYFVTDCSGTMKLFGRKRPQRSADTSEKSPETVNVQSRDVSVAESDTEMMTENVYLGQEQYQPKELQVSAASLIGSRRNQQDSLCYTSLPDKGFLAVVCDGMGGLGGGELASYTACAGMVDAFQKCGDAQPADFFVRTASEIDVSVAGIADAEGVPIGAGTTLAAVWIKENGMHWISVGDSKIYLVRGHQTRCLTTPHNYKMLLDKRKQAGTITSEQYQAELSRGEALVSYIGMNGLKYMDVSMEGLELEAEDQIVLCSDGFYRQCPEENLAQCLENLSGDYETYASQLAEAVIRNQPRGMDNTTLILVRYSPEENEKKIREVNEENEKGDIKTMKLSTCPKGHFYDADKYASCPYCVPQDEAEAVTEALNVTMEDFSTRAPSTGASADGAVQQPVSVQTSGAAQQAASGQTSAAVPTSEKRRTAFVNTAVSGWEEPEEDENCTVGYYAQVIGIEPVVGWMVCIKGAYRGESFKLKSGRNFIGRAANMDIVLGADQSVSRLRHAAVVYDPKSRAFIVAAGDARELCYLNGEVVVTSQKLKAYDVLTLGNTELMLIPLCGEKFSWDDASEKNGVNRMAKEKQPLTAVQRGKRGALIGMILVEIIMVLMIFVESSNIIEVIGGILIAGFGGALYGFGYAFGMRWLLGWAAGALHYSGHVLDAGFLWWICTGRKEGIIRGLIFSMFLISAAVCFAWIPGVVKGIKDVRAEKKNSAAETTGYAVEGKKAGKPWRLKKAEKQQDETALPTQNAAVKSVSAQSQTVSAQPQPMVAINQAAAGIARYVDCYGGEFNGASFDMKDILQLAIGRNPQLCRVILNQSGISRVHCLIQYRRDGMYVQDLSTNGTYLLNGARLPKGTFVPVKIGDGVRLGQQGPEFRFRMAIKEFFPTNLAVRDTDNETVVPADDTKAVYYRTGMKSFSEEGRILYLLSDIEHVVHVAEQIQANNTTYLVMEYVPGISLKKYMKQQQKLFSEQETLTLMQPILLALQTMHQKGILHRDISPENLMLSPDNTLTLIDFGAARTFSRSDDDNLTVILKRGYAPEEQYHSNSRQGPWTDLYAVCAVMYQMLTGILPQEASARAEEDHLTPISRIEGLSLSPSTCAVLEKGLQMDPMERYPDIGALMKVLYPTKKEAAREITDNSPKETQEMDASEKNAELSKQSESANAPSSINTHTHTYDQVSAPVPDSTVSEKEPPKKKSRKRRYIAIGLIAALCFDLVFGGPLFYPIRGYRYPWFIRPFSSSIGTPESYAMDDALKLNDRETLLSSIREVNDMWDKVINHPDEYSDKIYTKAYIKQLPKWCTKLSENWDNFDFDLTSSYNTESNVSANQSQQEAADIGILIAHTVISADLSYIDSDEACTAISTLFDTAYSSGAAYASENGYADYTTFAGFIPVHLLYSMPLISEQFEDVESIYAMDDSKTTLHNAIQRFFDGHQDAVAEYSVWIDFSSEDNAKDDFLQQMKLYIDENNISWQSETSDTDISESVSSANITSDTTAESIRITAIQENIEDAVASKDHEKLLDNLNETYDIWKTMLSNPSAYNELLSSYSNLLTSWCDHTAEQISNSDFLLSTFLMTDYDSTSKAALADEMLAISRLMSIIGVSSDTAYIDYEFSCATISGLLATTYETIYNNAQESGENNLNDESAIYAAAKAVKMLYTNAVYYSSFADSSDHYLETLHQSLYRFFKSTPESVTRFITYESSSDESAEDEDFYQQLQLFVNDSDSTVMVDIDKLCPGCMQHLKDSNTTCPHCGYPEKHLTVKDSLPVFSILAGKYLLGAPLGKGGFGITYIAMHLPDMENNMHRPRYSLPPQAIVGGRYLVREFLEEQENQIIYLATDLVEKKQVRLAECYPKALVQRKGEAGEEDMIIRPRREPKVEEIQRQFEKKYKQVIRDHHTVYAVLPLNKKKPMGAIALCMAVIVLGAGMLAAIFFSGKSKEPVENSQDIVITYEDNDYIMRPSADRICQEETSGAKYYDRMVTAFLRREPSEDELQALVDSVNGTLTGQIRGAVDYVQIELPESGFDKIQQAAEMLMENELVRYADCDYPIDICENVDETDTNPWSKKQNSKGCKYDEGKPGGNNWWAECIGAYTAWGLKSSVTDHVIVGIIDDGFNFRHEDLQGKTSTILKTSSGEDRDVVNWNHVLSVKNEWYSTFGDHGTHVTGIIGAVNNNIGIRGVADDAQLLVASWRLENGTNNALSSGEYVAMEEEMIARGAKVVNNSWGQTVMSDTDLNELRSCDEYTAKTTANMIIGMLEKGYTQFLFVQSAGNGLNREGKIGLDSCYNSCFASVCLLENSDFWTEHGEGYTYEDIRDHIMIVGGMKRDRKGRHVDTGFNYGNDVDIYAPGREIYSTLGEANKNKYGKMSGTSMATPMVTASAALLWQEEPMLTVDQVKDYLLQNGRTLDITYDKSGGNAELRPEHLSQTPVGLSIGDAMRAMKIKEAEERTAVALPEYLKNTLIPQYGIMSTDSWKLDNSLPTWSKGDDSPADGILSALIEDFDRDGEDELLVVRFEKEDNKKLYLEVFENYDGAVELATGAKFDIDWLCRTCQNNRLSVFAEKKDGMCRIYLYAFQRGNGGGDESLVQLEYEQVMMPQITLENYWSFRMGSDGTASVQSGTLKFNEINQVVGLWDYGQGTDQAEADYEETAGAPYESDSYPEAFIGMLEDFYGNLEETTGLVHKTELPQYFGDDSIGIYVSADDVYSGEMLYTAKNLFEEDSNTIWIASLDNHMYHDLSSNTIENTMIPQDYTGIVRMNIKKLTLTAFFAAIAVAGSLFSFPVLGSRCSPIQHLVNVMCAILLGPWYGLAAAFLAALIRNILGLGTLLAFPGSMCGALLSGLLYKWMKKLPAAYIGEVVGTGIIGGMLSYPIAAVLMGNQTAALFTFVVPFLISTVGGTIMAIVITMTMKKTKVLARIQQQINSMPTFSNQAQLSYNGITANSNIAYGQILEVLAASKTALSDTYASGDRITYIFSIVNSGTTAFSDLTVTDNLGAYSFTTDTPETITLYPLTYIPNSMQLLINGTLQPAPTVTAADGITITGVSIPSGGNAAFIYQADINDYAPLAATGNVINTVRVTGAQLAAPLTATHTISTATVPNLSIVKGICPAQIAENGRITYTFSIQNYGNTATTDDDLVQIRDTFTPILSDISVTYNGTVLPTSNYSYDQVTGVFSTNAGVINIPAATYVQSQTTGAYTLTPGTATVTVTGNISGMLREIANDFYMNQNYNCGECILRAANKAYDLGLDERALKLASGFGAGMGCGNTCGALSAAMSVLSLLFCGDKAHETEGFKELCAEYVDTFKASLGSDNCEELKARYRYPEGDDRRCLITVEKAADVLEAFIASHQSEPASDAPSETPVSADEIKRLKGLGFLNNKGTNRFNARVVTGNGRITTAQARCIADAAALYGSGQITMTTRLSQEVIGVEYDKIPDFIAYLAKEGLETGGTGAKIRPVVSCKGTTCQYGLIDTYALSEKIHHLFYKGYRGLTLPHKFKIAVGGCPNNCVKPSLNDFGIYGQRVPQPNTDLCKGCKKCQIEAACPISLPKVVDGKVFIDPDKCNRCGRCLHKCPFHVNEDYIAGYSIVIGGRWGKKVAMGKRIPKIFTTEEEVLATLEKTILFFAEQGQKGERLSDTIHRIGFEKVTEELLSDDILSRKDAIVGDALKMKNASYGMIKCNCSEPSKISKNRYKMLAFLRLFLKFYLADTPHRRNAMRRADREVTDVDGMIDIIDHCKVCHIALMDGEWPYIVAMNFAYRYENDQLVIYLHSAKEGKKLDLLRKDDHVCFEMDYDHEMIPAKYACAYNFRYASVVGRGHCEIITDVDEKIKALELLMKHQTGEDFVMEAKHTLAVEILKITVEEFTGKRRFKKMATTIHKMSCPYDCPSTCGLEAEIEDGRLIKVKNDKTHPVSKNGICRKMQHYEQDIYSTDRLRTPLRRVGRKGEAKFEPISWDEAVREITDQFKAIIEKWGAEAILPCVYSGVMSDIQRNCGDAFFNRMGASELVKTLCSSAKGAGYDAVVGKTGCLEPTELNDSDLYLIWSCNMAATRLQTLADLQKPANRHKKKILIDVYPNPTAAYCDQVITIKAGTDGALALSMMHVLKNEHLVDKSFVEKYTSGYPAFAETLDVYTPEWAESETGIPAEVIRQLAREFGQAKAPAIILGSGNSRHGNGGMTVRLITILSALTGAWQHPGGGLCGCTPIDTDYVNKSLITRPDFRKKPARKININQIGQALAMEGKEAVRGFYVYGCNPANTVSDQQLIIRGLEREDLFTVVHERFMTDTARYADIVLPATFSVEQTDIYRAYGYCTLSTGRKLVDAPGECRSNWDTFCLLAKGMGYADDYFDRSENEMLDILLSHPTRAIAETSDEAKETLRQGGSIALPFSDHLAFGTETGKMLIVNEKLAEPMPHYTAGYSGKCQDYPLHLVAAPSVWSLNSTFLDREHLMASRKEMTLWLNPEDAGTRQITDGMPVMAFNELGEVQFTARVDDRVAAGNAVSEGIFAGHQTQNGSGFNTLTHGRLSDIGAATTMNDNRVDVRPLQRVMIDEKTMVADTLAGINGELTRFGEMIPQTENKQLKQTLKQLRNACETSQEEIYQLARAHQYYVPAEKASTQEIQHVKNILTQGMDELSVLDLQNLRHLIGGYETSHKKMMEYASGASDPQIKQFFQKSAQSAMQNKQQLMQFFHMSNFMFSLNATLPVFLVIVLGWFLMQKKTFNENFVDIINKFVFKVSLPVLLFKDIATTPIRDAFDPKFVIFCMIGTTIMFMGIWALTSIFMKDKSMVGAFTQASARGSAAVLGIAFVQNIYGNSGMTPLMIVSAVPLYNIYSVIILTFCANNQDHSDKAATIKRAFKNILTNPIILGIAAGVPFSLLNIELPPLVLKTVTNVAQTATPMALLAVGAGFEGRKAIKKLKPTMIATFIKLVALPTIYFPFAIAMGFRESALVAILIMVGSPTTVTCYIMAKNMGNDGVLSSSIIVMATLLSSVTLTFWIFLLKSMGLIMAIKIFIDQGHNPSGPNTGAEGFGLKEQDITYQVGKDLAALLRADERFEVRLSRNTPEERLGTSNATSLAARVRAANAWPADYFVSIHANANTDSAINGTEVYVYRKYTQSYYLAQHILNAVVNIVGTKDNGVRANPSLYVLRRTNMPAVLVELAYLTNAGDAGKLETMQSEFARGIYEGMLSYFGMDQMRYKKFGKTGLEVSEICLGTWGIGGAGWDAHSDEERMDAIKAALDCGINFIDTAPAYNAGRAEQYIGETLHCLGARKHVILTTKCGNKYVDGKYIRCGSEALIRRQCEESLRNLQTDYIDLYLVHWPDPNVSMEETIGAVAQLKKEGKILHAGVSNFTKEQIEEAGKYCEIEAYQPQYSMLDGDNEAVIRWAAAQDMGIMSYGTLGGGILTGTYREVRTFGETDNRNRFYPYFREPLFSKVMELLEVMDAIAAERGVPLAQIAVNWTLQQPFITSCIAGAQSRKKVEENCAGLEWQLTEDEMHRLDQAIQRYQFPVQCGEVYQRRMDENLSPAFLISESSPSKVPASDLFIARVILSKIDRSTHFLLNLYGNHCIDLIIFRMALPEHTRQPAPNSEKSSGKKKKFESNNKYFSICTYVVATFTICLIIFKFINNWRDMQIYTSSILSTLSPFLIAFLIAYFINPLVNRIDHILFSRTAPQKFAKLHKFLSLLLAYVIVIGFIALVLTFVIPQIVESILELIRQSSSLYDTIMTNLNLLNERYPNIDFAYIIDTINNALPNAINSVQAVMTDIVPMIYNAGMSIISWIINIILAFVISCYLMSSKHRIIHSMKRIIYALFDQETAYKVIFTIKECNHIFGQYIIGKALDSLIIGIICFVLMCILHLQYPLLISIIVGITNMIPYFGPFIGAIPGLIILLIISPKQALIFLILIFLLQQFDGTILGPKILGDSTGLSPIWIIFAITAGGATCGVVGMFLGVPIIAVLVYLMNHIFDYMLYKKHLKTDLSNVIIPEINPDNVFIPKDFDASKANDPKAASDASDTSSSKENSHMIKVNLQNTAVQNMLTGQNTLDSVFIDGNSILFIEKPEYLKQLYRDEIKARAIKVNLKVAREEIHKRTQDDRYNNLDDMETLKKFRAQTDELRETEKEYRRMLGECENVKMIPVYSGTKLDVTTGDSVEVKQAEFEDYIETEGNKARMVLDILALDADRLERDCQWLQTKGCDINIMTTPGVPLAVEGGTLEEAIAALIEKKAAMIDRKSQSRASFLMSGWPGALLEWPAASAEPLTLLSEHATIMDYVKKYGELIKDKAGVKPERARSMIRLGLRAENARTKLLPNKEMPKAFRMLTHLAMESVLKALDHPEKSCWTNIFAPVEIMQCFGLQCVSMECLSSFMSGFKIEDYLIDYAQNEGIASTLCSYHKNFIGGVDSGVLPKAAMSVTTSMICDGNINTFRHMEQKHQVESYVLDIPNTYSPEAERYVVGQLQELIELLETKTGQKLDMNELKAAIQRENESKEYYKAFLKEQKHRYYPNTMTLDLYMLFASHLNIGTRETLDFFKCLAEDVKTYPEFNGKGILWVHLMPYYQETLQQYMNYQEKYYIQACDLNLDYMEPLDAAHPLEALAKKMILNIYNGPYERKVEMIRHLVKEFQSDAVIHFCHWGCKQSSGGVMLLKEAMREENVPMLILDGDALDRRNSHDGQIKTRLQAFLELIDNIEEDKDMIGYVCKYTPVEVFEAMGVEIRRIQPEVTNFNQADTLMHPNICSFTKSVLEDVLAGDYEGVVLTTCCDSIRRLYDVLKQQCPDKFLYLLDVPRKVNDFSTDMYRENILDMVHAYEAFSGKTFDEIVLKQLLERREAGQNLRTAPKNKASVHIGLMGARCSKGIIDLLENRGVDILFDMTCTGLKREFHVEPDNLLQAYAWQLLNQVPCLRMVKAVNRENYMEGFRDRLDGILYHTVQFCDNYAYEYTDLKHRLDIPMLMVETDATKQCEGQIRTRVEAFIESLKIAKGASIGKKSLKKAEDGKMYVLGIDSGSTSTNAVILNENKEIVAFDVVRTGAKSGESAERILSEILERAGLKREDISLIVSTGYGRVSIPFADENVTEISCHGRGAHYFNPDVRTILDIGGQDSKAIRLNENGEVVDFVMNDKCAAGTGRFLEMMARTLEMDISEMGPESLKWKEDIDISSMCSVFAESEVISLIALNKEKADIAHGLHKAIANKSYSLLKRVGLNETFMMTGGVAKNPGVVKAVEEKLGSKLFICKEPEIVGALGAALFGLDKMSQAKIFKLLSEAYGLTWSGGIAAEVIDGCPVTLKEDRYYVQVSAYMPERVYEAKHEIFNEQMKAVKGVKCGFDKKTSRITTVLSQPNRVVEQYGALREIIKQYAAPYVEEDKCPYCGQGECDMAAIYNNQYRRVHVRCHQYHTDRTRDVVLSGQGNLAMGIIGALAGAVLFMAIALAIGIFAERSYGWFFVLATFAALGGYKLFHGPYGRTGMVTVTLCSILSMVLYLFCEMVYLIAQYYELAIGEVLKQWPAVIQIAFSPDNLAESWFQLIFFLGGLAWFLIKRPLSKQKVVGTMDVMDDFNRALMPGYVIHLAEAELILDKMRKLRQTDDAFEQAFLTGTLLPDTRLKGEKRFSHFWDPDKLECLALGPDLARFTDKYGQRLNEPVMLGYLAHLHLDARYVTEYWPTVMAFYGCTGEPEYRKAHIAEVEIKRLQKCVPVSQFFSIDYYYGDYTKLNGYFIHKYHLRVPKWQSIPMSPPEEVNLQDMQMICRELDHLKKECHAGDEKRIQVFELGSLERFMAASAEEFCDSYIMNYILTAATAVSKEAGSMSEMLPKFGVIALVVVIILIGMFIYAKKKKMHRIMKKGENMRLFFTKMHGLGNDYIYMDGFDSRMSKPAAWPSEQKGRLAVMMSRRHTGIGADGLIFIQPSEEAAFRMEMYNADGSRGAMCGNGIRCAARYAYDHGISTNQSFQVQTDSGIRSVYIRKTDEGEHITSVRVDMGVMANLGEQRVLLKAKEEWTDFTGGSFPVQYVSAGNRHCIFFVENVEAFPLKKAAELIHTLPGNEDGVNVEAAAVEKIAVTGEKYIKMRVVERGSGETMACGTGACAVTAAAVWQGYCRYDENVEVRQPGGILTTDYLADGRMLMEGPTEYVFEGYFDIPIASFYNGTRMSDFDETLNEEELNIITLTDEDGTDKDFEFLDLIDLDDKEYVVLLPVESEDENADGEVIILEVHPLDEENEEYLSIEDATTLNKVFEVFKERFKDDFNFVDMKDAIGVIGGMGPLASQLFYKMITEHTAAECDQDHVPLLILSDVTMPDRTGAILDGKYDAPYNRLMEDAKFLEEYGCTAVVVTCNTAHFFMDMIEHELRIPFISMIRESAKEVASLHPGSVVAVLATDGTVKAGLYQRALEAEDLIPWVPDADIQKEVMYQIYDRIKKGLPCDKASWQKIEDACLEAGCSRVLLACTELSVIKNDEKLSDWYIDPMEILAKRVIEFSGKKYQMNNPIISLEGVEKRFGSNLVVKKMNLEIAEGEFLTLLGPSGCGKTTTLRMIAGFEEASAGVIKVEGERIEDKEPFQRNVNTVFQNYALFPHMTVFNNVAYGLTIKKVPKPEIQQRVMEMLRLVQLEGFEKRKPDELSGGQKQRVAIARALVNKPKVLLLDEPLGALDLKLRKQMQIELKRLQKKLGITFIYVTHDQEEALTMSDRIAVMHDGVLEQLDVPMEIYEHPKTKFVAGFIGESNIFDGKVTDKKDNVLTVQTEAGMMQVCGADFEVGEEMHVAIRPEYMDVSKTPVEGFDLPGTVKDFIYQGTVVKTALDIKNGQEIKYSRFEQDTDIAEGNQVYVYWRPEKAVAIKKSMMNNKKKKNMLPALAMAGPVSVWMILFVTIPMLYIIYISFMSRGVFGDVVYKFSTESYKTILNPTYFKVILKSLKAAGITTILCLLLGYPLAYIIAHKPKDTAAKLITLIMIPFWTNSLMRLNSWLLLFQTSGPINNFLVGTGIVKEPITFIYTDGLVLIGLITNMLPFAVLPLYSTIEKLDKSLIEASADLGASAATTFMRVTLPITFPGIFSAIILVFIPSLGIYTVTDMLGGGKILYIGNIIKNQFGSIRNWPLGAALSVMLIVITMLLIFIYTRFAKIEDMEVVMSKIAKKRKRLNIISNVYAFLVYALLYIPVAVMMVFSFNDQKYNYYWNGFTTQWYAKLFTNSTLVDSLIYSLIIAVLSTLISVFIGTIGALGLKRYEFKMKKFIDNMLYIPIIVPEIVLAVALLIIFLKVGVSMGMGTILIGHCTFCIPYAIVTIKGRISGDNETLEEASMDLGANRVQTLLRVTLPNIFPGVMSAAFLSFTMSFDDVVMSNMLAGAKQSTLPVLILSMNKTGVTPDVNALATIMVLIIVAAMILNNIIQGALHKRVKMKKRLLATVLAGAMVLSMAACGSSNANKTESAAASETANASTEAGAEGGETQAAAQEGNASSELNIYMWQQYISDDLIKNFETENNCKVNLSYMSDNADAINKLTAGGGDEYDLIMTCDAYMKSLIAGDYVEELNLDNIPNSSNINDTYWVSKGYCVPYLMNYIYVVYDSETCPVEIHSYNDLLQSGLKISTIDGARNLFPIALVALGYDPNSTNESEIAEAYEWLQKFNENVVAYGNAEQNLTNGTANVAVTYDGNASWAMKEKNTIKVADFTSDPIQLGIDLFVMPKGAKHVDLAEKFLNYICTAEVMAKNLEEFPYSCPNDAAVAAASDDYKNDPARDFSYKENVFFQEDVGDALTIYNDYYQKLKVGEMKEQFIILSIFLRFLISYVGKLFEVSETKDLIYIDKSFADEYAGSVYTQKLRGALPKVKANMSQGIPEMIEIATEKRWKEDFQGKHKKRAGKGWFRYNTRFALPVVNEKGDILEYNVYQAVLIVRYSSDEKLYLYDIQNIKKETRYPSWTRSSDGQKPVSFHMLKFDEQKQLDSVNGALALRGRIEEIVDAICAEGYKNICWLGIGGTWASALQAEVHMKEKSAIELFSENAAEYVTTGNKRVGKGTIVILSSVTGSTIEMVEGVKKAQADGAKVFGFIDKAEAELAKMVDYVISYPANEQLKFFMVADRFMKNAGEFEDYDEYYAEMDAHLAQGLVDVEKAADAFGAAYAEKHCNDKLHYFVGAGNQYGSTYSYAMCYWEEQHWLRTKSIHSAEFFHGMLEVIDKDTPVTVFVGEDSQRRLSERVAAFLPKVCANYTIIDTKDYPIKGISEKYRGSISHLISHAVTQRIDAHIEKINCHPMEIRRYYRQFDYMKEIIFAGSGGQGVLTSGLIISDIAASEGIHVTWVPSYGSAMRGGTANCTVKYSNDGYIYNPSPETPDLLLAMNHMFAKKGKSKFNESNARAFDAGFNAVMERKVAELELGFFTSGYQRYPLEQAFEDASRFGYDYIELWGGYPHAYVEDLTARGVGEIDRLIQKYRMSVKCFTPEHNGYPFNYMAGDEFQWERSMVYLEKAIELTAAMGAPMMLFSAGHAGYQMTGHEIEERLQKSLERLTAKAEQQKVKLILEPLTIYESNVITSLNDLERALDKVPSPYLVGMCDLAVPYTTGEPAAEYVRRLGGRFGYLHVIDNDGVSDSHILPGDGNMPLEGILREIRRAGYDGYATIELVTGYLKEPSVYAEIAIKRIRSILMRENKMKKIRIAAAGDNCMDVYDKENKAFPGGNPVNVAVYVARLGGASAYIGPVGTDVYGKQMMDAIQGKGVDVSRMKILEGTTAVTHVEIVDGDRVLGDYEEGVMADFKLDAEDIDFLSSYDMVVSGLWGMIENDLPVLKEKGAIVAFDFATRPDDPASVKAIPYVDYGFFADDDKDEEELKKMLIDLHAKGPKVMVVTRGEKGSMAYDGEKFYYGGIVPCEVVDTMGAGDSFIAGFLYAICEGKGIQEAMADGAANSSVTIAYSGAWMVLNLRKNILILNDLSISCRLIRSDRRSVGLEIRKIPEGGAELLIRAPRRMKIAYIEWFINEKERWITEKYLAALVEKPRPQMMKIPEYVTEQWLRTEGAERFQQKTAFWAARMKVTYGRITIRDQKTRWGSCSSRGNLNFNWRLLLMPERVMDYVIVHELAHRREMNHSAAFWQIVETYLPDYRERRQWLKENGVRYAGPVKLPKYMNSKKMQSNLMLLLTAFIWGVAFVAQSVGMDYVGPFTFNSVRNFIGAFVLLLFIPLLDKVNRQSAATVNASNSDAASATDIASTSSSSVSDKKTLIIGGIVCGILLAIASSFQQVGIVYTTVGKAGFITAMYIVIVPILGLFVGKKVRLIAWISVGLSVIGLYLLCMTESLSLGEGDILVLICAFCFSFHIMVVDYFSPKVDGVRMSCIQFFTCGIICGIPAMLTESPNLHAILTAWQPLLYAGVLSCAVGYTLQIVAQKNTDPVIASLLMSLESAFSLLAGWIILHQYLSPKELCGCLLMFAAIMLSQIPEKKSVAAMKIVVKFGGSSLASAEQFKKVADIIHADPHRRFVVPSAPGKRFDGDTKVTDMLYGCYDLAEAGKDFDGALADIKARYDEIIEGLGLDLTLDKEFETIHEQFRLKAGRNYAASRGEYLNGIVLANYLGFEFIDAATVIRFDDAGNFEADRTDLILSSRLKDVEYAVVPGFYGAQDDGVVTTFSRGGSDITGSIVAKAVHADVYENWTDVSGFLVADPRIIKNPEAIEAITYKELRELSYMGASVLHEDAIFPVRKEGIPINIRNTNKPDDLGTWIVESTCRKPKHTITGIAGKKGFASINIEKDMMNSEIGFGRKVLQVFEDNNLSFEHMPSGVDTMTVFVHQSEFEHKEQQVISGIHRAVHPDLLDLESGLALIAVVGRGMRDTRGVASKVFDALAKANINIKMIDQGSSELNIIIGVKEKYFEDAIKVIYDAFITNAAPAKMDVLKLLEDVKNDKVSLEEAAKELKQLPYEDLGFAKLDHHRQIRSGFGEVVFCSGKSDEHLLKIYETFYKTDTEVLGTRASEHQYELVKAVIPEVTYDPLSRILKIEKPGKERIGRVAVCTAGTADIAVAEEAAQVAEYFGTNVDRFYDVGVAGIHRLFAKLEEIRKANCIIAVAGMEGALGGVLAGLVEVPVIAVPTSIGYGANFGGLSALLTMLNSCSNGITVVNIDNGYGAGYISTQINRLAVKAYKPEMSKKVLYLECFSGISGDMTVGALLDLGADPEVLKQSLDSLHVDGYEVKIGRSSKCGIDACDFDVLIPDQPEYDEGHMHHHDDDHDHEHHHHDDDHDHEHHHHDDDHDHEHHHHDDDHDHEHHHHDDDHDHEHHHHDDDHDHEHHHHDHDHHHHDHGHGHHHAHVHRNIHDVFAVIDRLENEHVKTLAKKMFMIVAEAESKAHGLPIEEVHFHEVGAIDSIVDIISVAVCVDNLGVDDIVVSELYEGSGHVHCQHGMMPVPVPATANIVAANHLPMKITDAQGEMVTPTGAAIAAALRTQDHLPEDYQLLKIGLGAGKKDFPKANVLRAMLLETKDQPQTGEEEDIWKLESNIDDCSGEVLGYTMERLLAAGARDVCYAPIYMKKNRPAYMLHVLCDRRQIPAMEEIIFNETTTIGIRRYKVERTILKRHEAKAKTAYGEVELKICEKNGIVYRYPEYESVKKLCEAAGVPFKVVYQAACEAEISEMEIRTRLVNYMKELGDKDLCVAFSGGVDSSVILRAACEAAAANGKKVYAVTFETKLHPKADLPQAQKVAKEAGAIHHVIYVNELDNEEMLNNPVNRCYLCKKYLFQNLLTFAAEKGIDTIMEGNNADDLLIYRPGTQAVKELGVLSPLAELGITKAQVREIAADMGLSCASRPSSPCLATRLPYGTPISFELLARVDAGEQWLKEQGFPIVRLRVHGDILRIEIDKERFSDFIAMADKITAKMKELGFVYITLDAEGFRSGSMDVHIVKMRQKYHFATDNGILIWDVTSILEDIEQHPDSYTIQTLSTTLLADHNDARVSHTRAMASDLTKPLVVAELSKDHLLLIDGNHRLHKARALGLENIPCYYLSQKQQQHFIVHFRPSEYEHIIACVSMNRFINDTKKYWKYTLYAAKSQLKTEVANSYLNWIWWVLEPFCFMLIYAFIFGYMLGHKELYYNVYIFVGLAIWDFFNRCIKSSVRMVKRNKSIVSKVYLPKHTLIMSDMMVNAFKMLICFGLSAGMIIYYRVPIGWQALYAIPALITMIIFTFGCCCILLHLGVFIDDMANVINIVLRFVFYLTGIFYNINIFPEPIYSLVLKGNPLAFMISSFRDSILYQTVPSRKWLLFWFVISVALAAFGVRNIYKNENTYVKVIMEEYAITVKDLKIRYKSVQAYSIKKSLLRLKGVEAKAFEAVRGISFEVKQGEILGITGKNGSGKSTLLRALAHIFSADEGSIDLHGHSVSLLAIGVGFKNEMTGRENIMLSGMLLGFSEKEVQERMDDIIEFAGLGEFIDMPVRTYSSGMYSKLAFSITAILETDIMLIDEVLSVGDEKFKKKSYEKMKSLISQRNRTVVIVSHSLKTLEELCDRVMWMHEGKIVKIGEPVEVLNEYREFMKMKTIVELYNDDNRRPEVMERAGEILKKGGLVAFPTETVYGLGGDALNPEASARIYAAKGRPSDNPLIVHIADMEALKVLASEVPEKARLLADRFWPGPLTMIMPKSDAVPYATTGGLDTVAIRMPSHPTAYELIRSSGVYIAAPSANTSGRPSPTTAQHVYEDLNGRIDMIIDSGKVDIGLESTIVDLTGEIPTILRPGYITKEMLEEAVGPVTIDKAILADHEDPNLRPKAPGMKYKHYAPKGDLVIVEGKKQAVAETINHLTKMDAEAGLKTAVIASDENLSLYDADCKINIGSREHEESIAANLYEVLREMDEMGVQKMYSESFAGGGLGAAIMNRLLKAAGHHVIRVMIALGCDHGGYELMQEVIKYLEEHGLEYKNYGTYSTDSCDYPDYAKKVAEAILAGECEKGILICGTGIGITIAANRYEGIRAANCTNSFMAEATREHNDANILGMGARVIGVGTALKIVDTFLNTPFSNDERHKRRIAKIEHMSEKRQDYISWDEYFMGVAKLAGLRSKDPNSQVGSCIVSPDNKILSIGYNGFPRGCSDDVFPWSREGDELDTKYFYVTHSELNAILNYRGGSLEGSKIYVSLFPCNECSKAIIQSGIREIIYDSDKYGDTPAVIASRKMLDAAGVHYRRYIRSGRELKITVMKHLKSNWMSNLKTQNEALADLILGILIFGILVVFVGLFVAPDKAAFVLGAVLGTATSVIRAVHMAVTLDRQLDYGEKDARAYAARNYGIRYLIMIAVLLVSTRLGVSGMAGAVIGLFSMKPAAILSPQIHKYIYTRIFGKGRMGNEVDFMVHGYVPLNIFGHEVWLTTTHVCLLIVCLFMLVIGLIVNNKMKHATEVPGMVQNIAELYVEMMDGVVQSSMFRHWGKYANYILTIFMFLLFSNISGLFGLRPPTADYGVTLPLALITFVLIQFNAFKWKGVGGYVKDLMDPIPLFLPINIISEFATPVSLSLRLFGNVMAGTIMLALYYGMLPVLVTVVIPSFLHAYLDLFSGAIQAYVFCMLSMTFIYQKMPEMNGITNEGLVLACSAIGAGLAVIAGIGPGVGQGIAAGHGASAVGRNPGAKGDIMQTMLLGQAVAETTGLYGLVIALILLFANPLFGKLMEDRLFGLDVQLLFDAFVLFVVIMIMYAIMSRLFFKPVRAFLEQRKQAVAADRDEAQQLQEAAEVSKAAYEEKLKAVHKEAEEILSASRKAAMKQQDAIIDQAKSEASAIMEQADRETVSEKQRIKADVRKEMCGLALAMTGRFADQADPQRGEVLLEEALKEMGGEAWLNMVELIVTAINVFILFFLIGYLVSDMLSGMLTKRQERIADDINTARMSKEEALALKNDYEHRLADFESERADILENTRRKAAQMEERILLDGQQEADRVIARAKREAELKKTKLKEDVRHDMIMAASITACKLAAETLDDKKQAVYIQEMLDEMGESTWQNMAELIDKTYGEALFQLSLEEGKVEQYADEVRSIKEAIAENPEFMVLLDHPQITREEKVEVMRNCLDGRASDSVTGFFVTVIQAGRQHFLMGMIDYFLDAVRKYQHIGIADVTSACALSDAQKAAVEKRLLETTGDVSIEINYQVDPEIIGGLVIRIGDKVADNSIRTQINTLTKAILNSMNLRPEEISSVIKEQIKRYKSELEVSDIGTVVQVADGIARIHGLENAMQGELLEFPGDVYGMVMNLEEDNVGAVLLGSNRNINEGDVVKTTGRVVEVPVGDAMLGRVVNALGQPIDGKGPIDTNAFRQIERVAHGVIERKKVDTPLQTGIKAIDAMIPIGRGQRELIIGDRQTGKTAIALDTIINQKGQDVLCIYVAIGQKQSTVSSIVHTLESFGAMDYTVVVAATASELAPLQYIAPYAGCAIGEEWMEQGKDVLIVYDDLTKHAAAYRTLSLLLRRPPGREAYPGDVFYLHSRLLERASRLSDDLGGGSLTALPIIETQAGDVSAYIPTNVISITDGQIYLETEMFNSGFRPAINAGLSVSRVGGDAQIKAMKKIAGPIRTELAQFRELQSFAQFGSDLDADTLQNLAQGERIQQILKQPQYQPMPVEKQVVMIYAVTRRHLTDIPVDQVLDFEKGLLEYMDSKCDDVLAAIRTEKVLTEDIEAGLVKAITEYKKVFLEENKRMASMREIKRRKTSIQSTAQITKAMKLVSTVKFQKAKVKAETTRPYFDKMYETVSSILSRSGNIHHRYLMQGESQKKAVIVITSNRGLAGGYNSNVEKAVTSVGFNPADVQLYTVGSKGRDNLSKKGYAVAKDYGDVIEAPTYRAAMDIGRDVLNAFSSGEVGEIWMAYTVFKNTITHIPKMIRLLPVAVPEEETAEEKKDGPLLLMNFEPEPEEVLDAVIPKYINSVIYGGMMDAVASENGARMTAMDNATSNAEDMIENLTLSYNRARQGAITQEITEIVSGAEALKMAEHSIGKITQIIGAVLDIKFADGNLPEINDAIRITRKDGSTLVVEVAQHLGDDTVRCISMGPTDGLVRGMEAIATGGPITVPVGEKTLGRIFNVLGEAIDNKEAPQAEEHLPIHRKPPAFEDLSDEQEILETGIKVVDLLCPYQKGGKIGLFGGAGVGKTVLIQELIRNIATEHGGYSVFTGVGERTREGNDLYTEMSESGVINKTTMVFGQMNEPPGSRMRVGLTGLTMAEHFRDTGKDVLLFIDNIFRFTQAGSEVSALLGRVPSAVGYQPTLQTEMGALQERITSTKTGSITSVQAVYVPADDLTDPAPATTFTHLDATTVLSRSIVELGIYPAVDPLESTSRMLDPHIVGEEHYRVARSVQEILQRYKELQDIIAILGMDELSEEDKLVVSRARKVQRFLSQPFFVGEQFTGLKGRYVPLSETIQGFKEIIAGKYDDIPESYFLMAGNIDDVLAKVKMEALMQLQIITPDRLMCDESVKMVEMRTAEGEIGVLPGHIPVTVMMAPGVTHITKADGSIRHIAIHDGFVEIQPDKISIMAEIAEWPEEVDLDRAKAALSRARERITNPGPDTDIARARRAWARAAARIELLTREWMISMEKRIFLFDNLKFFLILTVVIGHFIAYITKSSHMMSGLFLFIYSFHMPFFIYLAGLFHSNHNIKNRCVSFIAIGFSMKILFALCRIVFLHKAFFSLLADPGVPWFMFAMAMFTATSYFLRDFNTSNLFILFTLLACFSGYDKSLGDYLYLSRFIVFYPFYLLGQMTNKEKVLSITQRPVLKIIGAICIIGWGILCMTQTGHLSFLLTLFTGKHSFASNEIFAFYGPIYRALCMAITIIAGFCLMCIFPNKKLPFITKAGSRTLQVFFWHYPFIYFLTGIHADKLLSDSAPGKIIWLLISILLTLLLSTRIFAFPVKGIQKSFSSGKYMVFFIKQVIKMAFQQVILPIVYKLYAVKPIKQGTILLADAHHDEIPFSLMALKAALEQQEDLHITEMYWNNEHCSAGRVLRNMFEFMKLYAVSQTVVICDNFLPAASCRKRKGTKVIQLWHAGGALKKFGYDTADDIPAYYKGNVMANCNLVTVSAKRCIEPFSSAMRLPCQRVKAMGISRTDLYFDENFNRECREHFFEEYPEAKGKKIVLWAPTFRGNPGVAGVKGLKGIQRISERLKATHYFIIKLHPHTQVHLAGSNCEILTEELLPAADVLITDYSSILFDAMIYKLPIVLFVPDLEEYVDNRGFYLDYREIPGIRARNERELIEIFTDPSMLNASVNEAYMTFYRKYMAACDGHATERIIRYIKRYMMANNIYGVILAGGKGTRMGNVERPKQFMEVGGKPIIVHTIEKFAIHTEFDKIIILSPKAWISHTNDLIKKYIPMRDKLVVVQGGSTRNETIMNGIRYIEENFGLDEDTIIVTHDSVRPFVTHRMIEENIQAAMACGACDTVIPATDTIVESKDHQNISCIPERSTMYLGQTPQSFKAKKLRDIYLNMTEEEKEILTDACKIMVLKGEQVRLVEGDVTNIKITYPSDIRMAESLLGGKMLNTVYQLVRPRQFEVVFKDITMDDKHVIVHPTHLSICNADQRYYQGLRAEAVLKKKLPMALIHEGIGRVIYDPTGHFEQGTLVVMIPNTPVEQDEIIAENYLRSSKFRASGFDGFMQEYVSMEPDRLVVLPEDINLSVAAFTEIVSVSYHAIQRFLRFSHERRNVIGVWGDGNLGYITSLLLKKLLPDTKVCVFGVNEYKLNDFSFVDDTYLVTDIPEDLHLDHAFECVGGAAASKAINQIIDYINPEGTISIMGVSEDLAPINTRMVLEKGLRIFGSSRSGRADFQGLINLYKEHPEVVNHLEKIVGAEIKVRSIADMTKAFESDIHKIMGKTVMIWDNMKKVLKKIYDILPNGIKKLYWQTRKKVGQILMFRIVFPLGYKHYIKGKKIKRKKAVFVEVRFDEITDSFRLVYDRMKADGFDVHEQFIENIKPGKWGYIKRCLRMLEDISDAHYVFLNDACNVTSCIPLRKGTKIYQLWHACGAFKKFGMSTAELIFGDNRKTLEKYPNYGNLSYVTVSSPEVIWAYEEAMNLKDTKTQVVATGVSRTDVFYDQHFIEQSKAAVYSVCPAAENKKIILYAPTFRGRVAKAESPDCLDIPAMKRALGDEYVLLIKHHPFVKQPPVVPEDCADFAMDVTKSLEIDQLLCVSDVCISDYSSLIFEYSLFERPMIFFAYDLDDYFDWRGFYYNYDELTPGPVVKETEEIIDYIRHLDARFDQAQVHAFKEKFMSSCDGHATDRIMALVYAETRNKRKMVETEVKRNKKIWVFNAGDAFSGNPKWLFLYIVNHRKDITPYWLCYKENMVSYMKERGYKAYLFNSSEGKVIERQAGIYVVNQVKEVIQDELKGVTILNLWHGVGCKSIERKVNFGFLNERIAKKYIKNNYYYKNYQLFLVTSPLMENHFKEQCGIDDDKVIRAGYPCCIHNEAANSFDHDVLKRQGLPENTKIVVYSPTYRDASATEFFGKAIQDLDRLVEVLEKNGMLLIFKMHPQMMKDRKYNEAMERYKECNRLMFWDNQDDIYEVFDQIDIAIIDYSSIFYDMLAGGVKHFIRYMFDIDDKNNLRDFVFDVKEMTCGYDCNNFDELLDALDHSDACLQEDETRKREIYDLFWEYAKSAGNEEIVEAALNFEPNPVDLPTVYSFDIFDTLIKRKALKPASVFYYVQDMLAQDEIRFPNLLLNDYARIRMQCEANVREWYKKTLFKREGDRLEITLDEIYERMQNVYLLSDEQIARMKELEQQTEIEQCIPYPEHIDVLKQHLANGEKVLLISDMYLPKETIIKMLEKADPILTTVPLYLSSEYGVQKTTKKLFLEAYKDMDYIYGEWIHYGDSPVADCKKPSELGITTINHTVPDLNEYEQLLVEQLQSYDAYLAAAAMARYREEYKDEIEDEEGSKIFAYAYASLYFVPYINWAIKDAVRRGTECLYFISRDGYHLKRIADALIEVKGYPIKTKYIYGSRKAWRIPSFVNEIDDEFFSEFGNFANIKKYDSLLKAMDITEEDFIRIFPELEYLKSSGRISKGLLKQLRLKFSESDEYRHYIIEKAAEERKLVKAYLQQEINFNESFAFVEYWGRGYTQDCLTRLLDDAAGHEVPDPCYYARSIYGTDGRSIRYNYTTNTGSLIFIEALFANLDYRSVPGYVEKNGRIEPIILPCDNDMVMQKAFEENFVRFAKDFYGQPLQDEDRFEREIFNFAMDYYRDYADTPIMVKNIAHLKDSVEQYGAAAEFAPQITFGRVVGRFFKKDYFYTKSRKMSLARSNPIYQKGYIWYKDTFKKTNTFKNIRKLMKKRKMKKISVVVSVYNEELSLNKFYQVTEKILESCAWDYEMIFVNDGSVDRSIEILKEFAEINSKVKVVNFSRNFGHEAAMIAGIDYSTGDGIVCMDADLQHPPQCIPDIIQKFEDGYEVVSMIRTQNEDAGFIKRFTSAAFYKVLNMLSPVKFEDNSSDFFALSNSVAEVLRNDYREKIRYLRGYVQSVGFEKTTLEFSAGKRTAGESKYNIKKLIKFSINALCSFSDLPLKLGIYSGCGVAFLGFILMVYTIINKFINHVPAGYSTIIVVLCFMFAVTLIVIGIIGEYIAILFAEVKDRPIYIVREVINDNKDNMVKKELKKFVVLLLVLGMMLSGTQTVWATEVTNSNENNKTPVVAAKIETETETETETETETETETETETETETETETETETETETETETGTETETETETETETETETEQKNGWFENEKGEKSYYIDDKPVVGRKTIKAEDGKAYEYYFDKNGVMQTGLQKIEDNNGETQVYCYDVDGKKIFGEYKCILNDKKWHYFDVKTGIMVTGFATIPVKSGETKRVYYDNSGAMXXXXVRMIIVEQWXXXXSGKMVTGFATIPVKSGGTKRVYYDNSGAMVYGEYKCNDNKWHYFNTASGKMVTGFATIPVKRGGKKKVYYDNNGAMVYGEYKCNDNKWHYFNTASGKMVTGFATIPVKSGGKKKVYYDNNGAMVYGEYKCNDNKWHYFNTASGKMVTGFATIPIKSGGKKKVYYDNNGAMVYGWVSTGGTNYYCDLKSGALKYTFKKQNGYYLAYNNRGELVKDLRSDFGNQSSYVIKVNTSTNTITVYAKFKDGTYTMPLVAFICSCGAPSTPTPLGTYYTSDRWRWLRMMGPSWGQWVTQIKGDYLFHSVYYNSKNNNNNLSVKAYNKLGTACSHGCVRLKAGDAKWIYDNCKLQTKIVIYKGASSTDPLGKPTAYKLSSSHTWDPTDPNMAYKCKQHGCHMIEKTIKKNNVSTQRYYSIYTVLFAILAILVYSYYIINGKSFVYCDVNQGGDGLVQHFNAFVYYGKYLRGIVKNLLFEHQLEIPMWDLSIGYGQDIISTLSYYVIGDPFAFLSIFFPVAKAEYGYSFLILLRIYFAGIAFSVYCRYRKKDSLYTLVGAFIYAFSYYTLCIAVLHPYFMLPAVYLPLLLMGADKVLRKEGDCFFIAMVALAGISNFYFFFMLCIMVVIYVVFNYFNLFGKIRIREFGYWFVRFFIDAILGVGMAAVLLLPSIINILSSSRISVKNYIPVIYELKYYLNLMPSFVSGGGDYYVHMGYTALSFIAVLILFMHRKEKKEYKYLCAGFLLLVLFLIFPFFGHLFNGLSYVTNRWIWALAFCVSYITVTVLPLMGRINRKEWLILFCAAIIMGGFVIGLDVVRTKKNMWAVYGIIAVLVILYGMAYCGKQKFLADTCVAIVMVSVSINALYLYSPTEGNYLENFSNRGGAYRQLTQKAPEYLLKELNDTELYRFDTLGFDTGKIKRNSAMQLNMYGTAYYFSATNGTISKFISDLYINTPLENSYNNLNGRSWLDAITAVKYFIIPKEKQNLLSYGYNHKVIENKENAVYTSKNSLPFGFTSSVIMSQDEFEKMDVLEKQQALLQGIVLDGDNISDSDAALEFSDVSVTPQIVSADGVEWKDGKFIVNKKNGAVTVSFNGMSNSELYVVWERLNYKGINPYSLYDEDKLNGMSVYARNNLKRKYQYWKEPSTANVTASAKERESKTTIYTDKNPYYCGHHNFICNLGYSKDIRNTLTLTFDKIGVYSYDDMKVVNQPMDHFDLYCSQLKENVLEDIELETNSISGQISLDESKALCIAIPYSSGWSAKIDGKDTQILCADDMFIGLMLSPGKHQIELRYMSPYLREGVVLSCISCVVFIFLLVRHRKKYKDRNMKQQNIIKKAMAFLLVFCLVAVEYGSCAYAETISETNEFAEKQQENTNEKSSTDEVATTEEESTEKSIAVESNSETETMVQTEETVSKKHEITGFVSLDDSERTITCSYSDKPAETELLDELPSTLKVYLDYGTEIQEIPVTWRCAGDFDSTAFFYYEYDPIWDNEKYELSTNESMPYIGVQLYTISTLSITNNDNETIIYDYLVNNMGLNTAAAAGILANIYCESSFNPNIYSSDGTSYGICQWRDASDVKRFTALKNYTENWQTLEGQLEYLHYELTTDYPGLMNRLRSVNNNAEGAYQAAYDWCYNFEVPANTKNVAVSRGNLARDTYWPYYSGFNDIEKDDISISGATVPHQMKKGTSFDVRGSITSKYILTSVTVGVYDCDDVMQIGQTVEPNSTNYDLRRIDTSLKFGSLESGGYRYRVVARTGRSVTTLVDSAFMVLSNGRTVADGTYYIESMKNNGYGLNVSGNSNASGANVVLGAKSSSNYMKYVFSYQSNGYYKIKNAASGQYLGVTGQKSASGSNVEQASGGTRWQVIPDGKGSXXXXCIGSGEWYCSQRNEYPDLELMNILVINCGSSSLKFQLIDMTTEAVQAKGLCERIGIDGSRIVYTPAGGEKMTIESPMPTHTEAIKLVLDCLTNAEYGVIKSLKEINAVGHRVVHGGEKFASSTIITDEVIKVIEECNELAPLHNPANLIGINVCRELMPGVPMVGVFDTAFHQTMPKKAYLYGLPIKAYTDYKIRRYGFHGTSHSFVSKRVAEFLGKPVEDLKTIVCHLGNGASICAVDGGKSVDTSMGFTPLAGLVMGTRSGDIDPAILEYYANKEGLTLSEVTTVLNKKSGMEGLTGGKSDFRDLEEGYEAGDQACIDAIEVFCYNVARFVGAYAASLNGVDVIAFTAGIGENSGFVRGKICEYLGYLGITIDAEQNSKRGEDIIISTPDSKVTVCVIPTNEELMIARDTKALVEAQMSQFESVNDYISFMKAHPNMTCPIKHTLDIIGGKWKLFIVLQLFGSEQLRFSQLSKNIPGITNTVLSGCLRDMEKDGIILRHQFNEIPPHVEYSLTEKGRTLSNVLLAIADWGMENMEFNKTIAARQSVRKFTEAQITNEQLKAILEAANAAPACMGQYDHLHLTVVQKPEILAQINAAFQKAVGDPNMQVTYGAPTVIYVSCKNEDEEIVKGCNAGVVMENMLLEAADLGLGAVYLFGVSQVLFANEEITKLLQIPEGFRTVSAIAVGTSADALQERTLGTDKISTTTLMRRFLIGWILVVLLLPFAAAWIYSEWSEKNQQIEQESSQIQIDVQTVSGVQRMGTSDFLIGAIAGQIPAEFEVETLKAQAVMARSCLYKQAGDRYYISASDTGMTWCSETERKKMWGTSYKENNDRIRQAVRETDGQILYSEGGQMILPAWFYIGNGKTRSAKEAWGEETSWFQSVESSWDTESPEYETTTEMTKRQLIRQMKRYDPAFDCPAETLASNCEITAVDSAGYVTEIQIGNRLMSGEDFRYALELPSACFKIAFESNRVQIRVYGRGHGVGFDQYGANRQAKEGKNYEQLLQYYLTGVKVGEMASLSKKKPLSRRQGLARYLRELEVVDYRLIISIVFLCVFGLIMIYSASAAESGVSLVLKQFGIGAGGFVLMWIVSYVDYHFYEKIAGIIYIGAVLSMFLVKVPGLGVTRNGASRWIDIGPFSFQPSEFVKPAMVILMAYLLTRMGRKLSTLKADIVLLIPGVIAVMVILVVTRNLSTALIVLGIIAFMFFIAYPTKKIWRLIAVIGVVIVIGWLGYYHFVIVPNHTMTLTNTVTEAASKSFRDDRILAWLYPDDYPQASMQSRYSMYAIGFGGILGRGLGRGTMKYYLPFSTNDFIFGVIGEELGLVGCGLVVFLFVYQVWRIFTVARHAKDKLGSYMAFGVGIHVALQVILNIGVATGVLPNTGISLPYISYGGTALLLQLCEMGIVLNISRQIPGRRVRIGDSSQKSEHEEHRQIHAAMKNIMNIFKKNGFYVMALVLVAGILAVSGIAGYVSGQKERGAENAVDFKDDGAGTALNAPASAETDTPIVDEMTGYNADLVQKILSMIENGSLALEDFEDEGSMNGQSGQNVSQEASAELADDAAGTEADAAVNAELDESDAEMAGSVINAGYQSGDPMTWPVRGEIVMDYSMDATTWYPTLQEYKCNPSILIQSEEGTDVAAAFEGTVTDVYNDVRLGNVVEMSLGNGYEASYGQLENVDVAVGDTISQGEVIGEVSQPTRYYSVEGSHLNFMLTQDGNPVDPLDYLDMKKWYILKNMQPFFTTALHRYRLLNNNFHRLLYHIRAGVSKTSVLFSVRELQRNQIVYCLNFLIWYNIVRTIMKKMTTFVCVAAITASLLAGCGSKTAETTAASTEAAAATEAASTEAAVEGTDADKEAAKKVADLIDAIYVQERNDNTDEQCKEAKAAWDALTDAQKELVEGENADPDYFGRDTGDASKDDPRNQDDIGENELLVVSFGTSFNDSRVKDIKGIEDALQEANPDWSVRRAFTAQIIINHVEARDGECIDNMDQALERAVANNVKNLVVQPTHLMHGAEYDELTAAVEKYQDKFESVKIAEPLLGEVGDDASVVNDDKKAVAEAITAEAVKTANYDSLEAAKEDGTAFVFMGHGTSHTAKVSYSQMQTQMQELGYENVFIGTVEGEPEDTACEAVIEAVKNAGYKKVVLRPLMVVAGDHANNDMAGDDDDSWKSQFVASGNFDSVDCQIAGLGEIPAIQDIYVAHTAAATAIKMKKKVIVLLWAVILCCTLAAGCGKKNTLADGTYTADFNTDSSMFHVNEAYDGKGILTVENGQMTIHVSMPSKNIVNLYLGSAEDAQKDGAELIQPVTDTVTYSDGTTEEVNGFDVPVPVIDEEFDLALIGKKGVWYDHKVSVSNPVAVEETDSKMEVSEMNLADGEYTVEVTMEGGSGRASIQSPTELTIENGQAQAEIVWSSSHYDYMMVDGDKYLPVNTEGNSTFEIPVSVFDESMTVIGDTTAMSVPHEVEYTLTFASESVASVQSSGGNGMGGAGIAIVLALVVAAVSSMRLRRRKSRRIMKKIILLFIVTGILVGMVTACGSAADGTQKTHDTEISQQLTFDHSETLDYAQKFSIDRYQDDYALVTITDDSRYLVVPEGKVAPDDLDPDIVVIQQPVQNIYLAASAAMDMFVSLDALDSIRFSSLKADGWYIDEAKQAMEAGDILYAGKYSTPDYEKIVEQNCGLAIENTMILHTPEVKEQLEKFGIHVLVDYSSYEPEPLGRTEWVKLYGLLTGHEAQADKAFAEEKAAFEEVKNSVADEADQEPKTVAFFYITSNGQANVRKSADYLPKMIELAGGRYIFDSLGDEDDAMSTMSMQMEEFYAGAKDADYIIYNSTIEGELSSVDDLLAKSPLFEKFKAVQEGHVYCTSKNLYQSTMSLGTITSDIRRMLTGDDADLTYIYKLEMKSRRYGAAFAILAALLLILLAMNLCIGSVNIPLSEILHILMKNSGSDTYTDIVMNIRFPRALAAAVLGGGLALAGYLLQTFFHNPIAGPFTLGISSGAKLVVALVMVASLGNALRLSSWVMIAAAFVGAMICMGFVILMSSVIEQMAMLIVSGVMIGYICSAVTDFIVTFAEDADIVNLHNWSKGSFSGMTWENVKVMVLVTGIASIGVFLLSKPISAYEMGEAYAANMGLNVKRFRVLLVLLSSVLAACVTAFAGPVSFVGIAVPHLVKWLLGTARPILLIPACFLGGSVFCLFCDLLARTMFSPTELSISTVTAVFGAPVVIYIMIHRRREKAAMREDYFYTEGLTVGYQGVPLIREIAFQLKKGEILTLIGPNGAGKTTILKSLIRQLKPLDGVIVLEGQKTDEMSGRDFARKLSVVLTERVRPEMMTCKEVVATGRYPYTGKFGVLSKEDWKIVDEAVRLVHIEDLAERDFTKTSDGQKQRVMLARALCQQPDILVLDEPTSFLDIRYKLEFLSIIQEMARNDRLTVILSLHELDLAERISDKVLCVRGDRIDRFGTPEEIFCGDYISELYGMTAGHYDAGTGELELQPVSGAPKVFVIAGGGRGKAVFRRLQRQGMPFATGILWENDLDYPSAKALAVQTVAVRTFSAVDAEHIEKAKELIDSCETVLTVFDRTEWTKLPEGLKEILAYAEEKSKLTEMAKEMTEFNNRLDKLAEYCMNSGRFDQDLYIEYDVKRGLRDSNGKGILTGLTEISDVVAFKSVHGRKIPIDGQLYYQGYNVMNLVEGNKTSRFGFEEITYLLLFGELPNKDQLQEFLDILGNYRELPDNFVRDIIMNAPNANMMNVLQKSVLTLYSYDDHPEDISVNNVLRQSLQLIARFPLIAVYGYHSYRHYILDKSLVIRRPKPELSTAENILRLLRPDGRYTELEAKVLDIALIIHAEHGGGNNSTFTTHVVTSTGTDTYSAIAASLGSLKGPKHGGANLKVQQMFKDIEEHVTNWDDDDEVTEYLIKILNREAFDGKGLIYGIGHAVYTESDPRCVILKKYAQALSNEKGLTKEFELYNRVEGIAIKLMQQHRQLFKPICANVDFYSGFVYTMLGLPMELFTPIFAISRISGWCAHRIEELANEGKIIRPAYKYVGHHKDYVAIEDRWWMHYNMKILYHYIGVFASCFFDFMRQCRRMDENIDMQLMMNNIRHKRINMHKGDKKEKEGVDGLKKNCMEALKNNSQAIVRALTVAVAVVLQAITMVLVGRYLHEYASWAYVLLEIISFLLVFGLINDQESYRQFWCVIVLVFPVTGLFLYYMWGQRRRNSKTHILIRETEAKMRQYVPHQPEVMEELQELHPYKVQIARFLGSEGFNMYRHTDVKYFPLGEEMLDAMIEDLKKAEKCIFLEYFIISDGVIWKRVKEVLIEKAKAGIDIRLLIDDFGCLGINTAEFRDELVKSGIRLAVFAPIHKNVDRLSFNYRNHQKITIVDGNIGYCGGINLADEYANIIQRFGHWKDTALRLEGEGVWGLTSIFLEMWEVAMGYEITTDYTVYMPTVKMPSDGFVQPFCDGPANNPNNPAEDVYTHLINKARDYVYITTPYLVIDRKMTEDLCRTARSGVDVKIIVPHIYDKWYVYMVNVANYGPLIANGVHVYEYMPGFIHSKTVVCDDECAVCGTINMDYRSFYLHYECGVFTCESSAVADIRDDIHETLKQCQEIYLDEWQSRPWYEKIVQWVLHLFAPVLMKKKRFQKIYIEIINRCNLSCSFCPTSDRPARMMSVDEFAKIAAQVTPFTDYICLHVKGEPLMHPWLGDILAIAHQNGLKVNLTTNAVLLPEKHQLLLGETAPRQISLSLHSFDANTMHTRDFRSYLENAIDFARTFTMTTPGYISFRLWNLDGTAKADQRLRNQFILETLEKAYHLAQPIDAYVGKVHGNAIAPHTYVNFDQLFEWPDEHAPDYGFNGTCHGLRHQLAILADGQVVPCCLDHNGHLALGNIFIESLDTILCKEKSLRIIEDFRSHHIHENLCRRCGYRTRFMTDFFKTIIKKHFSYFLIEDQLGSTFSHSFNDFQQLDTFQQNLYYMKKVLTIAGSDCSGGAGIQADIKTMTAHKVYAMSVITALTAQNTTGVYGVLDAGADFVGQQMDCVFKDIFPDAVKIGMVSNIETIQMIAAKLKEYNAKNIVVDPVMVSTSGCALMQPDAMDTLISVLLPMGDIITPNIPEAEKLCGFEIKNVDDMKKAAEVIGRNLSGSVLIKGGHLTETADDLLYHDGEFMWYRGERVNNPNTHGTGCTLSSAIASNLALGYDMKTSVQNAKNYITGALKDGLDLGEGSGPLNHCFNLMTGVGYNQMERLIMLGTGNALVTRCYNTCFAIQDDDEYFLVDAGGGNGIMRQLQDADISMAQIHHIFLTHEHTDHLLGMIWMIRMIATKMRREQYEGNLRIYCHSALVETVRTIANLTLPKKFTRLLDHRIQFVPLHDGDTKHILDYDVTFFDILSTKAKQYGFTMRLKNGQKLTCAGDEPLNENCFGYAEGSDWLMHEAFCLYSQRDQYDPYEKHHSTVREACELAAYLNVPNLILYHTEDDNIERRKALYTAEGRLYYKGNLYVPDDLECIELDKEEMSQHGRFEQDYLRMKVQIDKLKASGLSEEQRTIFSELDKMIQHFEHHLFTEYIDFEEICDNLPDAIYVASPDGTSIYVNDTYTKLSGITKAEIIGENVHQINREKKLYTNGILPTILKYQKRSEIIGVMKKTNTTVHISGFPIFNDKHELKYAVACDRDIQQLETVKDQLIQLKSAIEKKENENSYLRTQQIQQSEVIFKSDQMYQAVSTALAVAPTDATVLITGESGTGKEVITNQIYQASKRFGKPFLKVNCAAIPDTLMESELFGYEPGAFTGASKSGKTGIFELANGGTLMLDEIGEMSVQMQTKLLRVLQNHEITKIGGHKAIPVDVRIIAATNRNLLQCIEEHTFREDLYYRLNVVPIQLVPLRERKSDIEVLFYHFFEKYTKKYNKPIEIYSDALHLLENYNWPGNIRELENVTERLVVINQDNIIDKKMVALVLGIRNTDSYAHPEDEYNLKASTIALEKHIIEKALATFHTKRKAATALGIDHSTLVKKCQRYGIMAKKTIITAAVTGAWPKKENNPNVPMTPSEIADDVYACWKAGAAIAHLHMRDDNGNGTMDKNKFIETVNLIHERYPDCDIILNLTTSGDIYATDDTRLEHVQILKPEMASYDCGSMNWLNASLFINSPAFLERCGKLFQELNVKPEIEAFDPGMIANAAYYLKKGVLKAPLHXXXXGNNGSALPGFYMVYIRCWTFRNGNYVRSSCFRRPHPCWHGRMYSKGVLADSNAQFVERAARVIREYGNEVATPAEAREILGLTKMTWGPMYMYYHCPKCGLKFEYAVDMIPDFGEKFGYCPKCDVMGVYEKDGARQPDDADYLEVEMKEVKKILICGGGMMGSAIAQVLAGLDDVTITVYDKFPVDIEAKIRNNMKLLVEKEIVTPADVDKVISKISFTQDIESEGVKNADLVVECVLEDMQLKQDLFAQLEGIVSEDTIFCTNTSVMSPTEISAKCKHKERLVGTHFWNPGFLIPLVEVVRTEATTDEVVETVMDMLTRAGKKPVLCKKDVPGFIANRMQHALWREAISIVERGIADAKTVDDACKYSFGLRLPYLPPLVNSDMVGTQLTYNIHDYVLKDLEDSHEPSPLLKEMIDEGKMGFRAETKDGKKTGFMSYTEDEIAEINGGLNEYLIKMLYGKMSEKKRKGTPLWQISKKFNFAAEKIIPDSFVFCVVLTLVVAVLSLTVCHIGPVELLTSWWDGLSSQFTLAFQMGLMVVVCATCARSPQVSKLLDGLAGLVHTRVAALILLMAFGYVSSMLNWAFCTIVTPILAMQLAKRVKGLHFPMMVAGGYCCMILGQCLGPSATLYSNLATEGSNYAEIVGKTMTVAETCYNPVNVVLWVVLAVCFIVLVLFTQPGDDELVELRSIATQADVAPKDYQSREKATTPAEKMNTCKPIMWVVGAAIFIYIIYSIATKGFFATLNMNMVIFMFVGINCFLFPQPHSWMEAHTDSMHLATDVILQFPFYGAIMGMMYVEGGLGSVIVNAIVSVATAQTMPIFSFLSACIVNLFIPSQGGQFTVQGPLIVQAAQSIPGTNLVNCLNGFVFGDECTNLLQPLYVIPALSVVGMKLKDVWGFMAFMCVFWVVITCLGLYFIPMFIMEERFFTHNRGFYKTFFGMMLVLTLQNLVAYSVNMADNLMLGSYSQNALSGAATVNQIFFMVQQFALAFGNALVVLASQYWGENRKEPIRVLTGIALKAGLFCGIVIVVLCTVMPKQLLGLFTNAPEIINQGLGYLDLLKWTFAFYIITNILMAALRSVEIVNISFYISVVSLIINVAINYTLIFGRFGMPEMGIMGAAIGTLVARILELVIVVIYIIKDKKIELFKQKLLQSDDSLRKDYMKAAMPIILAQILWGVSVPMQTAILGHLSDDAIAANSVATTFYQYLKVIVIAMTSASAVMMGNGVGRGNMKRIRSDARTLATIDVAVGIVLGIILFALKNPLLSMYQLSGEALRLADHLIVIMSFVMVGMSYQMPVSAGIIQGGGDTKFNMVMSMISTWAIVMPLSFAAAFWWKLPVELVVIVIQSDQFFKGIPAFIRFRSYRWVKKLTNMPDLNYDLHIHSCLSPCGDDDMTPANIVGMAMIKGLDLIAVTDHNSCKNCPAVLTMAEAYGLTALPGMELTTSEEVHVVCLFADLADALAFDEYVYSHLMAVPNNEKIFGKQQLYNADDEVIGTIPNLLINATTISFDDVFALTRDYNGIMIPAHIDKTANSLLANLGFIPPDSQFTCAEIKDMSKYHELKKQHPYLEHCHIISDSDAHYLEHINEPHYTLSVKSRNPKDILSALTTAVMTIKELIDSGLFKTINVGDDTDRNISGLFCCDLLSIAMSKAPEDSVWVTVMGNINTLAVAALCDVGCIVLAEGISLDDAARAKAVQQHITVLSTDMPIFDAALKVHERIHAMNKKFFHSVYLDESLCKGCINCIKRCPTQAIRVRNGKARITSQFCIDCGECVRTCSHHAKKIHIDSLDILNNYAYTVALPAPSLYAQFNNLDDVNILLTALIYLGFDDVYEVGAAAELVSEASRKYVDEHQDQWPFISTACPSVVRLIRVRFPNLIDHLLPILPPIEVAATLARKRAMAKTGLPADKIGIIFISPCPSKVTYVKSPLGTTRSEVNGVLAVKDVYPLLLPHMKIAEQHPMDLAISGRIGIGWGCSGGEAGGMITDSYLAADGIENVIRVLEDLEDEKFAKLQFIELNACSGGCVGGVLNVENPYVAKAKIKRLNKYLPVARTHSEDIPQKVELGWHTTVEYEPVFRIGDTMLESITKMKQIEELCNEFPGLDCGSCGAPSCRALAEDIVRGKAEKNDCVHILRNHIHLLSETYSRFSHEAIVDGEDPNACIHILMHYMDKLTEEIALLDSHNLINSDAESEEEQDHDHMNDTIKLEYTVSGEDFTRAGEASSDLKNMLKQLGVSPDVVRKVSIAMYEGEINMVIHANGGIITVYISPTEVTMILKDSGPGIPDIDKAMQAGYSTAPDNIRSLGFGAGMGLPNMKKYSDDMKIETKLGVGTTVTMTVRICMLVRDLIPLLDAELIYGSDDIDIREIHSGCGSDMMSDVLAFVKDQPVLLTGLCNPQVIRTAEMMDIMCLVFVRGKRPDEKMIELARERGICLLATPHTMFTACGILYKAGLVGGAMKIPPVCFSVQASNCFAQRATGVNAVWLLYCGEGIILFVNSIAWVVYDFNKKCMASNKKTVPFYGTEEQKEQLLKVIQELRDEKGCLMPIMQKAQEIYGYLPIEVQKIISDELNVPLEKIYGVATFYSWFNLNPKGKYEISVCLGTACYVKGSGDIYNKLMEKLDIAGGECTPDGKFSLDACRCVGACGLAPVMMVNGEVYGRLTVDDIDGVLEKYNMMPEIALNVLDIAQNSVRAEASLIQISVDVDEAADTLTITIEDNGCGMTTEQTARVTDPFFTTRTTRKIGLGVPFFKMAAESTGGSFSIQSEPGVGTKVTAVFGLSHIDRMPLGDMNGTIYTLITFNTQIDFLYTYTFNQRSFTLDTREFKNILEGVPLNNPEVSEYIRQFLNENSHEVDGGAVVMKSLAELKAIRDRMQGEVNMREDDNSHHIRVVVGMATCGIASGARPVLNKLAEDVQAKHLDNVIVTQTGCIGLCQYEPIVEVYEPGKEKVTYIKMTPEKADEVVEQHLIRGQVLGKYTLSATNLMYRSHVLVCGGTGCTSSGSETLISLLQEELKKNGLENEVAIVKTGCHGLCAQGPVMVIYPDATFYSMVKPEDIPEIVSEHLLKGRVVTRLLYVEDGGKAKALKDTDFYRLQHRVALRNCGIINPESIDEYIGTGGYEALGRVLTEMSPDDVIETILASGLRGRGGAGFPTGMKWKFASGNRGNVQKYVCCNADEGDPGAFMDRSVLEGDPHVVLEAMAIAGYAIGASQGYIYVRAEYPIAVERLNIAIKQAREYGLLGKNIFDSGFDFDIDLRLGAGAFVCGEETALMTSIEGNRGEPRPRPPFPAVKGLFASPTILNNVETYANIPQIILNGAEWFASMGTEKSKGTKVFAVNGKINNTGLVEVPMGTTLRTIIEDIGGGIPNGKKFKAAQTGGPSGGCIPAEHMDIPIDYDNLISIGSMMGSGGLIVMDEDTCMVDIAKFFLEFTVDESCGKCTPCRVGTKRLYEMLDKITKGEGTLEDLDKMEELCYYIKDNALCGLGQTAPNPVLSTLRYFRDEYIAHIVDKKCPAGVCKALLSYKIDADKCKGCTLCARNCPNGAISGKLKEPHVIDQSKCLKCGACMEKCRFGAIYKEMENITIKINGVEVSAPAGSTILEAARLAHIDIPTLCYLKEINEIGACRMCIVEVKGARSLVASCVYPINPGMEVWTNTPKVIESRKKTLELLLSNHKKECLSCVRSGNCELQQLCKELGVEDQNYYDGEMTPAMIDTSAAHMVRDNSKCILCRRCSAVCEKVQGIGVIGPNERGFKSYIGTAFNMDLADTSCVSCGQCIAVCPTGALYEKDNTDEIFAAIADPDKYVVVQTAPSVRAGLGEEFGYPMGTDVEGKMVAALRRLGFDKVFDTDFAADLTIMEEAHEFLDRVQNGGKLPLITSCSPGWIKYCEHYFPDMTENLSSCKSPQQMFGATLKTYFAEKMGIDPKKIVSVSVMPCTAKKFEIGRDDEDAAGVPDVDIAITTRELARMIKKVGLMFNELPDEQFDNPMGESTGAAVIFGATGGVMEAALRTAVETLTGEELKNVEFQEVRGTEGIKEATYNVAGMDINVAVASGLGNARKLLDKVKSGEANYHFIEIMGCPGGCVNGGGQPQVRGSVRNFTDVRAIRAKALYENDAAKTIRKSHENPAIQQLYKEYFGEPGSHKAHEVLHTTYVKRVINKMTILRQSAMRELERLPEDKITFVLQIMRGINGLGEDERLAKKNAFKRLEHLRKKADINEDFSDFEDCLQMECARDYGAKYIVTRNIADYEKSEIKAISPSDFLKGELMHMNKDLAKKNNNLKVRIPMYFVGLFLMTIGIAISVKSNLGVSPVSSIPYTMTCVWGIEMGKATILFHTILVLIQIILLRRNFKPINLLQIAVGVVFGYFTTFCNYLVSFLPTPENILIRIIMMLISTVFIAVGIFFYLPPNLMPLAGEGAMQAVSQITGMDFSKVKIRFDCTMVLISIITCLITIHSPGSVGIGTVIAAVLVGTVLGIVTRLFGQQRDRLLYAMKESLHYLLMANHFMIQKALVTSVKDTGLTSGQPKVLDYLKNHNGAVQKDIAAGCHIEPASLTAILNGMETKGLIERRLCPDNHRFYNVYLTETGRLYVGRLENEFDTIESYALQNFSEADKEQLIEYLSRIYNTMLNYKGKEDKSNEMDTNRYGNVIVEGDAWIYIEDYAIEGMEKEVQPDLNKTYKLALQLFNTTAFSWSPDIIDVANAHTIGENFTPSFIPPHTRINRGDIIRLDGGNVIEQGPPEEIFVSPTQERTRQFLSRYLPEFTYNIMGEEKRTLSCTDCGVLNCHKRNASYPEFCLTEKLTDEDIAETTALYEDEENRKVSVISAEIEGEFYGKYTRVDEIIEFAKRMGYKKIGIATCVGLIEESRIFARILRKNGFDVYSAVCKVGSFNKTDIGLDEKYTCVTGNVMCNPILQAKLLNKAGTDLNVVIGLCVGHDSLFYKYSEALSTTLVTKDRVLAHNPVGALYQVKAYYKRLLDDMAMELLFENHTQLDEDIIHHIIEKDYKRPEKAKQYHVMTLLVGILAALAAVYFGRLGILTHQMLTLLCTIALIAVCIYSFYSYYQNMPKNQIKARQNTYSESLLIPRKMKVYKNVMYQSAGKSHGEYRLFQFTGIETWSHYFLLRYENSYVVMDKNGFTKGTAEEFEQFMTARIQKNCMKVIDFKNASCKHCYKCVRSCSVKAIKVKDAQATIMDDHCVLCGTCLEVCPQNAKTFVSDLEKVKAFITMGEKTIVSLAPAYLGIFDYDKPGQVVDALLRLGFSEVRETAEGAAYVTEAYTRLLAEGQMKNIISTCCPSVNELVEKYYPELVEYMAPVVSPMIAHGKLIKSMYGPDVKVVFVGPCIAKKQEAEGDDRTTGFVDAVLNFEEIESWLQERDISIRECEEKQPTNPDPKVNRLYPVTSGVISSVLAKKKVDSYKKIFVDGIEDCREVFEDMKKGLIENCFIEANMCEGGCVKGPAVNKLHISKYKATMVIEEQVEKQDPAYPQLAGNIDINKHFRSERIQDEMPTEEQITRILKATGKYNKTQELNCGACGYPTCRDKAIAVFQGKAEQEMCLPHVYEKARSMSNVVLEATPEIILIVDSAFQIIEFNKRAEDVFGINKSEAVNKMIFEIMDASDFEQVLEDHLSIKRKKIHLSGLGLVLLENIIYIEEMDAMLAIFQDVTDEEAEMERQLQMRMDTVDIAQQVIDKQMTVAQEIAGLLGETTAETKVILTQLRDSMMKEADQTDSRRRKIEWKMEVSVETCWKSLNKIHEELCGDKVEILKTEDSDVVILADGMGSGVKANILATLTSKILRTMFQKGAPIEQGVETIARTLPICQVRQVAYSTFSILQIFHNGEAYLVEYDNPGCIFVRDGKLMDIPYTVREIEGKKIREYRFQVKLKDCFVLMSDGVIYAGVGELLNFGWTWESMADYTVKCTRDTLSAKRLAAMLSQACDDLYMQKPGDDTTVAVARVIERKVVNIFTGPPKDMDDDERIMLDFITSPGKHIVSGGTTASIASRYLKQPVTNNYDGTPEVPPTSNIKGIDLVTEGVLTMNRTLYLLRELAKDDVDFDIFLQLDEDNGAAKLAKIISEECTDLNLFVGKANNTAHETLLFDVSVRHNLVEQLKEAAEKLGKNVTIRYYMYTYSMTQWLAFFFIYCFFGWCFESVYVSVHEHRWVNRGFMTGPYIPLYGSGAVLMLFLTIPVRGNYLLMYIVGAIGATVLEYITGTVMENLFGVRYWDYTDKKFNFRGRICLEATVLWGFFTLVMVEVIQPPVEHMVMMINDRVLYYMTWGITVVFTFDFASSFRTAIDLKEVLIQAERAKEEVQRMQKRVEVLEAVVNDSLESAKDGMEVRWDEQKQRMALLTEERMTELARHMDALRKRLENSESIERIREAVETSGAGEKLEDIQNEMRQMRGRIEAMRMRARTKMHPRQLHMMLRNPSARSFKYQEGWRYLKNKMSRGEDNEKKMKIALCQTTVHKDWHKNLRNAERVIADAVKSKADMVVLPEMFICPYNKKAISAAAQPEGGEAWQAMSEAAAKNHVYLVAGSIPESADGHIYSTAYTFDREGRQIGKYRKMHMFDIDVEGGQYYSESSVITAGDEVCVVETEFGPIGVAICYDVRFPELFRLLAKRGAKAVVMPASFNRTTGPAHWELLMRARALDQEMYVLGCAAAGDLAGSYNGWGHSIAVDPWGSIMEELGEGPGMLMAAVDFAKEDAVRSQIPVLQQLRTDIYEVCEKTVGMNKAELVAAMAEKTGMKKNDAEKALKAFVDVVTDELVKGEKIQLVGFGTFEVSERPEREGRNPRTGETMKIAASKAPKFKAGKALKDMINAMRLDKYLKVSRLIKRRTVANEACDAGRVMINGKTAKAGTDVKVGDMIEIGFGTRNVKVEVLDVQETTRKEDAKELFRYLMLAVKSMYMEEQPVVKPHRLTMQNRSTIQVTGVSDVIAYDPGEIILETSAGLLLIKGAELHMNHLSLEKGETGVDGRVDSLTYSEANGGARQAGSFFGRLFKMSQDVVFQARLFGMAVLWGSGLMLAYDCLRMLRMMIRQRKGIQAAEEAVFWLLAAGCLFGLLYRFNNGAVRNYIICGMGTGMVLYRWLLSSMVVRWMLAVLRPIRQIVRIFKTFVKNAGNTLQSAAAKRTIKGRKLQQRQGEHDDSMTANRRSVRKRRSKHKGSMKIITLIVLVLCGVFGVFTWQNTQKSEQYALVQENLQQQIDDEEENQKAIEEQAEYQKTDAYIEDLAREKLGLVHEDEIIFKKKMADLLYYVVEKMAGIHDVLMTLNDSYETMFSDKELHFIVIGVLGMALLFVIFPLFKALSRHHVLVIAWIYVFTVMIVVTFAIEIGQGITNTGKMEMEDIVSGLAGFMFLFIIFAVLRAIVLGIVHLVRGIMGRDDDDDDDDDEMMKNFSLKYGKSEVSFVLDGARSIQTLTENPMNTIEDIHAAFLKAISTDVIESPALDQLVSPEDQITIVISDMTRFWMRQDIICEELVRYLNEVIGIPFEHIVVLIGLGTHHKNTPADQKVLTGAYVYDHVAAVVDHDCDAPDLVDIGTTSYGTRVLINPLSIGRKVICIGGTVHHLMAGYGGGRKSIVPGIAGRETIRHNHAMALDPHCEQSDPRVGPGKFNNNPINEDMREAGALLHPVFGINIVVNSASRHSGLFCGDFDAAWRESCKYVQQCYGLPIKDQADVVFVSCGGFPKDLNFYQGSKSLFNAVRAVKPGGTLVMLAECSEGAGAKDFFDWLTPLREGHLDQSLREAFTIAGYIFYAACENIRKANILLLAGPKLDARIVNDMGIRKYDRMEDIMADVDIKGKDVYIIPYGGSVMPQTEADYTRFSTEIMRKLGMKDLLVIVLGAFINLFVWHDRNPVGVAFFCAAYALIPGKMLLAMAALFGMAYALPMTSFIRYTGLITTVMAMAAVLKKWRPAGLTPVVMCGLMVLTMVTAGVGYGLAYGEGWQQHMLDTLPESALELAAAFVCYWLFAGMIAWMKGWRPVGRRNMPMKEEAMITKNQLHAFSESFRKLSQSFEVDVSPRGALNDQEMQDIFNAVTEQVCKDCSRCSYCWENVFEDSCESAYEILKLCSERVNMKKKDLPERFRQRCVRSDNFLAEARRMMGLAQTNLSWQNRLAESRLALAGQFGEVADVIGDFSKQISDEPVRKGAPEKQAVHRLAAQKINVRRIAASDRSNGRKCVYIEAKTPKNIEKTAQEAADIIGRVYGRRYLPRPGTASVIGHRWEMLSFEEDVRYRTIIGDARMVRMGEAVSGDSFTVMHMESGQTVLSLSDGMGSGEKAEKESNRIIGLLEQLLSTGFNRQSAIRLIHSVVLSGSEPHTYSTLDLATLDLFNGKCELIKMGAAASFIKNGPDVKKITSEALPPGVLPEPENEVKTVEMVHGDMLVMMSDGVLMGLGQDDDRNEEKMAEFLKSCQAVNPQELANAILNHAMAACHYEAEDDMTVLVCGLYRKPKLMKVDKLVKNVYETIMASGMICQGDSVVVGVSGGADSVCLLSVLKNLQMSMALQLTAVHIHHGLRGEAADRDRDFVTALCEDMQIPCVCFQADIRAMAREQHLSEEEAGRKYRYDCFEEVRQERQASKIAVAHHRDDLAETVLLNLFRGSGLKGLSGIPMMRGCIVRPLLGVGRADIEAYLGRQGMSYRNDATNFETEYTRNRIRLDILPYVTEHINQAAVSHIAETAAIASDICRYVENQAAAIGKSIIQWNGEAECLTAEIDAAAFVGQDIAIQRELLRQVLERTAGQLKDIRSVHIGTLRALFYGHAGKKADLPYGLRAERTYRTVSVSQKKTHKSADALHGDDAEIRLSAPGKYVLDGGKREVCLKIFPVEKNLQIPKKMYTKWFDYDKIKNGLVLRQRRPGDFMMIGGGHKKAIRRILMDDKVPQSNRETLNMLTDGGHVLWIPDTGRMSEYYKITGETRLILSAELKEIEEMKEKIKVLLPEAEVDKKIQELGEQISKDYEGKNIHMICVLKGGVFFTCELAKRISVPVSLDFMSVSSYGNGTTSSGAVRIVKDLDEPLEGKDVLIVEDIIDSGNTLHYLVEILYKRRPNSIKICTLLDKPERRTADVKVDYSGFNIPDEFVVGYGLDYAQKYRNLPFIGVVEFTEMNNKKRGIGLWVVVLVCVFIGIIVSEGWNLLTTSDYSYSDFQQDIQTKAEQIEDVVISPNKETPTGMISVEWKNSSKEESFYVTDVNQVKEWLESVNYTDYKETDVINREGWFYNNGALLVLGGIFLWFLFSFINSQQSGGGNKMTDFGKSHAKMTKDGSHNVTFRDVAGLQEEKEDLQEIVDFLKSPEKYTKVGARIPKGVILVGPPGTGKTLLAKAVAGEAGVPFFSISGSDFVEMFVGVGASRVRDLFENAKKNAPCIVFIDEIDAVARKRGTGLGGGHDEREQTLNQLLVEMDGFGVNEGIIVMAATNRVDILDPAILRPGRFDRKVGVGRPDIQGRREILEVHAKGKPLGDDVDLDQIARTTAGFTGADLENLMNEAAIYAAKQSRAYIVQDDIRRAFVKVGIGAEKKSRVISDKEKKITAYHESGHALLFHLLPNVGPVYSVSIIPTGIGAAGYTMPLPERDNMFNTKGKMMQDIVVSLGGRVAEELIFDDITTGASQDIKTATETARAMVTEYGMSDAVGLINYTSGSDEVFIGRDIGHSKPYGEGIAAVIDQEVKRIVDGCHQEARRIITEHLDELHACANLLIDKEKITREEFEAIFPEKTENEKLRFMMLKAYKYRIYPTNEQKEQIAKTFGCMLKAYKYRIYPTNEQKEQIAKTFGCCRFVYNRTLAYRKEAYEKEKKNVNKTNCNNYCNQVLKKEYGWLKEVDKFALTNAIYNMDAAYQKFFKEHTGYPKFKSKHDGHKSYTTNFTNGNITADFDGGKVKLPKLKEVKAKLHRNFMKKQIGKPLMQKWKNKIGGKLSALDKKKLVLTNLPYALAAFYADRAFFLYRNSPGEDMGNKLLYAMEHADRIFAGFVLSNNWKDLLAGITVAVVLKVLVWQKQSDAKKLRKGIEYGSARWGTAEDIKPYMSEDPWMNIPLTATEALTMESRPKQPKYARNKNIVVIGGSGSGKTRFFVKPSVMQMNCSMVITDPKGTLIEECGKMLAKGPPKKDKNGNIMKDKSGKVVHEPYVIKVLNTINFSKSLHYNPFAYIRSEKDILKLVTTIIVNTKGEGEKASEDFWVKAERLLYTALIAFIWYEGDEEEKNLNTLLDLLNESETREEDETYQNPVDMMFQELEERDPQHFAVRQYKKYKMAAGKTAKSILISCGARLAPFDIAELREIMSYDEMELDKIGDRKTALFLIMSDTDTTFNFVIAMLQSQLFNLLCDKADDVYGGRLPVHVRVIADEFANIGQIPQFDKLIATIRSREISASIILQSQSQLKAMYKDSADTILGNCDTTLFLGGKEKTTLKEMSELLGKETIDLYNTSETRSNQKSFGLNYQKTGKQLMTEDEIAVMDGGKCILQIRGARPFFSDKYDITKHKNYRFLADENEKNRYKVEKELNPQYTPKPEEEVEVIQVELSEMQEEVTQKTVTFCIRTTKITADLLRKVLAAYLRHHKQKSVEKKAQKNQPKQGKVTVKELAKQNAGMVNIEITNKNIKSFERYARKYGINYALKKDKSKEPPVYLVFFKGRDQDALNAAFREFSQKQIQKANKPSIHKRLAAYRAMMPKKTKDKVKNRHQEQSRMENKVTADYLDEEGCLHCGICGKRKQMKVSLMGFEHVVSCLCECEVKARQELDEKMQREEAQRQLYQRKSIGLRERRFWEWKFENDNGSNQKILIARQYVENWTDMKRKNVGLLLMGPVGTGKSFFAGCIANALLEQGERVMMTNFSRILNEMTSYQADKNQIIQNLVDYPLLIIDDLGIERNSEFALEQVYNVIDSRYCKMLPLIVTTNLGLNEMKSTDLDTAHQRIYSRILEMCVPIYCGGEDKRKEEGTEKLVQVQSLITGMADFEYFRAEESDQFSFFRIPKALFTEKEFASLSTDAKLLYGILLDRISLSKKNGWIDGDGYVYIIYTIAELQELLRMSHTTVTKLLYELDSVHGIGLIERYRQGNNRPSVIYVKNFVKRSRGKPVRYFASGTPETGNPDCKELEIRIARNWKSGTQKNRSPDCKNLDGSNTKINKTEKNHTDKSKGNTPALEEKFSLNGRFKNVVLSEAELQELMTLFPWDYQKRIDHLSVYMKSSGKEYQNHFATICLWSERDGARAGRDKYEFQEGESLMSKMEYMPVDCLQVPKMLFQVEEFKNLSNTAKILYSLFLDRLKFAVQNGWVDHNGDLFVIYPKSEMKKDLNTTRYGVDQAVQELVKIGKLVRIVQNDGKANHFYINDIYENEMEEESMMTLDRIMANMQMEEREIIMDKMVKASRDILGTIADMGYLDEYETPLTPMEERGYYDEEGNLDIDAVEADSYEFGMDLAFGVLSVYEGKPERVLEIQKYVNEQYECCSNKKFMKVLETIARMNGNEEVYIEDMYACNKEARNYYLSELMMCFNFVFNEMCHGTGSAAGCDFNNEEEMVSVDQAYMVGHMKNADGSINNKNVVLSAACEAAELFQCMMSVNQKLEDWQRFNHTLEMHLRSVECEKIHDICQALYGMKHPSDELEGLYLAREDEQICLLYYQVFVGMLEINITSAEVLYKQKEEIINEMNTTVISGRLVRNPGYNEVENEKGLHKIAKFVLAVRRNYSDEVSFIPVKAFAKKAEFARDYLMQGTKVMVEGEIVTGNYEDKDTGKKIYTTEVYANRIEFAGAKMVDRPPFPEDAEGFLEIPEGMEEEMPFRMRERIESKHVTKEIKSQMPVIPVEIVKERGCTFCPYYLGNYEKQPRCMMKTCAWDDENERFHPVLRGLIPFYKEKMEKAEVKFLAMKKIYTTLLGMFADEMKQEELEKDECYGCAYGKCGPCIGICYKSMKAMTIEDVIKKSILPLAFMVFWFWMTKTIMKVSGQTDWFWWIFIAGLPFGIHKMRLILIPRGMDTTATLGMAALSVIIGALIGCIMIPVYVIRAVYVFLRYIIGKMALKIVRRYDANGRELTEKDLETFRLDSPVVREILANLNREVAEGIRQKEKKGDDMSNEDTVSRIQAYLKKIEKIRVKRMKREKFEHLLKTLGLSAGRKMPSKKRATPVSLQPLDALFGTNEETTNGISEIAIGSLHPFTNHPFQVRDDKKMEELAESITQYGVLVPGIVRLRESGGYELVAGHRRKRACELAGLEKMPVIIKDLTDDEATVIMVDSNIQREELLISEKAFAYKMKYEALKRQGKRSDLTSCQVGKKLAAEEVSQNTGDSSRQILRYIHLTELIAKLLELADEKKLPFNTAVEISYLRNEEQQVLLQYMSNHNMVPSMKQAKELKQISKERMLTYSEIDQICMNESTEKVQVQIPAKKLKQYFPETYTKTQMEEIIFKLLASWAEREGKEMARIISIVNQKGGTGKSACTANLAVGLAQKNMKVLIVDADPQSDVSAGFGYRDCDESNETLTALMDTVMKDEDIPSDCYIRHQAEGIDIICSNIGLAGTEVQLVNAMSREYVLKQILYGIKDQYDAIIIDCMPSLGMITINALAASDEVLIPVEASYLPIKGLQQLLKTIGKVRKQINPKLQVGGILFTMVDAHTNDARNNMELLRNVYGSQIHIFDNYIPFSVRMKEAVREGQSIFFYDPKGKATEAYRRVTEEVLKDAIMDYLKNSNTAVYWYPVFAVMLGTGLRVGEVTGLRWCDIDLEDGIIDVNHTLVYYDHRTSEGKKGCYFNVNTPKTEAGNRQVPMLDFVKMRYVLVMLGSLVGLVIVAWLLLCLLISVGCIYPANYAEQKINEAYDTILRADKVTAEMIPALCDYVIFSENGEKIGGDLSEQYEQIAWNVAKYGNASGKYFYKVIVRENEYVVLQYRLTPQYHSAFLREHFIEPQNVMSIMSVIGAVAIIIIPSIRFGKRIKKQMQPVLDAIGQIKDQNLEYETSCSGIKEFDDCLSAIDDMRDALRESLEKQWKTEQEKKQQMSALAHDIKTPLTIVRGNAELLSETELTTEQKKNITYVLNGTTQIQSYVKQLIDVTKSWNCSDVTYTTVRLEDFFADIKEQALGLVEIYHQKIDWKAGQSDKKVTIAYDPMFRAVMNMIQNAVEHTKENGIIYIDAKEQDGRLTFIVEDSGSGFTKEALLHGTEQFFMDDTSRNGEAHYGMGLFFAKTVAEKYGGGIKLSNSENTGGARVEIFFLSSQETSMAKILAVDDEPAILEMIESILNKDGHLVTKVSNPLKINMEELHRYDLILLDIMMPGIDGFELCKRIRALVDCPILFLTAKTEENSLVNGLSLGADDYISKPFGVMELRARINAHLRREHREHSVRMVLGRVCIQMSQKKLLMDDKELPFTKAEYEICEFLAKNRGQVFSKEQILEAVFGFDNESNDSTIITHIKNIRAKFAAYDYMPIKTVWGIGYKWEEMIGRSLNADLRKMKGTSVILAHLLIPIITSVIFLIYYFFSPWNENMKVIAFYQAIGAGLPVLIGIFTASVMEQEQNAGNFQNLLSLPDKLTAFLSKLLMLLVLCLCSILLTAIIFGIGFGRIASSDIEIMKGCIVAALLLWGSSVPLYLWQLILAFQFGKGVSIGAGIISGLISALMLTGLGDYVWKYVFVCWTGRVPYTYLQSVLGETSVGEWLSFIPGCLIFTGISMVYYFWWVNHWEGNRISEMVNIIKAEHQKAKRTMRKKFIWGFPLLTFVMAFIFTLGMTNAYAESVWNWWYTLLLPGMIALFCYLSVAQEKKIKYYHLMTIPTDRRKLLLGKIIYIGYMILFSNVIVFAGATLGGFLLTTHVPVGGALIAVLFLTVSELWEIPVALFLSERFGMIVNLFVCLFITVSGVVISQTRIWYVLVSAIPMRMMCPLLHVLPNGLAAEAGNPLLDTGVIVPGMCLSIIWFVFVTVLFLKWFERREVKMEMMLQTQNLCKYFRKQKAVNNVSLNIEKGQIYGLLGPNGAGKSTTLKMLTGMMKPTAGKIYFDGKLLGRKDLSKIGALIENPPIYENLSARENLKVRQLLLGTDENRIDEVLQIVSLTNTGKKKAGQFSLGMKQRLGIAMALLGEPELLILDEPTNGLDPIGIEELRELIRSFPEQGITVILSSHILSEVQLLADKVGIISGGILGYEGALKQGDNLEDLFMNVVRKNQKAGEIHGMYGEALYKPEMKEGNPIRLYSLDEITEIFCKLGLRICNSFADFSGKPSSDNDIQLMVYSIREMAMTVRKSDFTLTKLDDLFTTQAQREEEKLSKIRDIPLGLIDDFPDHPFKVRDDEDMLQLIESMEAMPQHISLASYGMQEKRDLHYLLLNGRRIEKRMNFFENTRKPQGFGGKLMTKMMNIGHAKLSQWGFSNISVNSDAAVLDVGCGGGANIVAWLGKCGNGHVTGMDYSKVSVAESQKLNAAAIKQGKCCVVQGDVSAIPFPDAVFDYVSAFETVYFWPGLEKCFFEVNRVLKNGGTFLICNESDGTNDADEKWTKLIDGMKIYTSDQLIAALKEAGFTEIKTYSNTKNHWISIVATKMAKKEERFEVTFRDGSQLKDEGVRQILVDKETGVNYLCWKSGYGAAITPLLDSEGKVIVTKMYFTDEKDYIMRMIKEMVRVLFSLMFGKKYVSVELEKENKYEVSGKNLKDFLDMIDSGEINEAENILLDSIDYTDRNEVMAAALFYQYLSEKDSEFLKNNNYTKEEVMSGFKQLLMQSGYTDLLCLVKDEEMFYDYMIYIVFDFMMAVIMFLFGMWFYKSEGKAANFLSGYNMKSADERKKYDENAMCKAYGKRMMFMSVPFIIGIIIDIQYLGIGCLIAWGIWLIMFVLLLIDRHKRERMLNENIKRIRKSKGLSQEELAIKLNVVRQTVSKWENGLSVPDSSMLIILANELDTTVSELLGEPVAEPTTDDLKILSEKLEVINLQLAKRSITKVKTIRWILISLCAVIVVIFIALASTNSFYLNWNYNDPELAVAGTILHGFEFLFVRLAPIVFLTSVVGVVVTYKKRMRTIYAEYNINHDSIDVYTSAGYMLRIDCWEAEKDLKTTYRSECALTSLAVDEPLEYARLYLEGNLQMWVDAEDSLELYMYAKLVFRNAKRSVKDYLVYIVTMTICVTLFYAFLSISSSYYSPDIGSEYDFTLLSDGMKIAICMITLLLLFLIRFVNHYMLRRKQKEFAVQSIMGMEQKTIGRIFFAETLIMGMFSILIGIFCGVFCSQFITAMLLTAYGEPYEISWTLFPDTVLLTVIFFVVSFFVVGVFNTRTIKKTKIIDMLSAEKENEPELKKSRFIPVVVILFLMFTLWELFSGIQNVRFYYDSRFVFPVKIMYWGNILLPVVTLGWAALWMLKKKKIAFQKLIDGLLICSVLHAFLAASVPALTNQYYLPLHGGILNQYLVFVLIDLLFFICALIYLASSLIVAWKVKSPEHRYKGENLFFFGQIISKLNTTSKTMTLICITLVLAIFMFIAAPILTGWASGYLDMRSMYDVQVYSRYNDVYEEENLPQDSYEIITEFLTEHKIDTVYDCTFNLYLPEKDDFHNRQKYDFPIVAISLSDYNTIREMLGYEQISLEEDEFTTQWKAIATEEERDSFLKEHTSIMTDAGELTLSGQSYYEDPIGETAYNSYTNVLYVLPDNICEKLLPVIKNRYITTTENISYENARKLEKLFTEKYPEQAETGAIYGVRFSTLQINSSIANNFILQTAMIYGAVVLMVICLTVLSLQQLLDAGQYKYRFSVLRKLGAEEKHIGKLILQQLSVWFGLPIITAIIVAAVVIAYFIQTISAEISAYIGFSTLMLQIGATMGILVILLICYFISTWIIFRRSVNPMNTILKLEHIQKYYGNEGNITKAIKDISFSVEAGEFLGIMGASGSGKTTLLNCISTIDTVSAGHIFLDGTDITEIKPKSLARFRRENLGFIFQDFNLLDTLTISENIALALAINKVPAGSVESRILDIAGKLNISDILNKYPYQVSGGQKQRCACARAIINNPKLLLADEPTGALDSHSSQMLLSTIQSINEQLRATILMVTHDAFTASYANRILFLKDGEIFMELRKGNDSRSAFFDKILNVLTMIGGGQSHVCMSGKQYLKNQLPVILINLLGMLVLALFLIASDNPIQTVLFIFAVWSIVLVLSLLAFYFSRKKYLNKLLNMTEQLEERYLLPEIMQVPERADEQVFYQIMKMAEKSMLERIGEVQRERREYKEYIEQWIHEVKTPITAMKLLCENNRSPFSREVLAELENINQYTEQALYYARSEHAEKDYSVREVNLCDVVHSAIADNKYLLRQSNMSIQIDDIETKVYTDEKWVRFILNQIIGNAIKYHAEQPILHFGATKTNDKIVLSISDNGIGIPKSDLPRIFEKGFTGQNGRTGKNSTGIGLYLCKRLCDKLGIGLTAYSENRGTTISLIFQMNDFIIGVQGMKEKILIIEDDFTIQTQLKTLLSGNGYEVFAVTDFSKTIEQLKEAAPHLVILDIKLPGNNGFEICSGIRTFSDIPIVFVTSSNTDMDELNSIMLGGDAFITKPYNPAILLAKIAALVKKAYRSPQTEIYMWREATLHLESSMIEYKGQKAELTKNELKILYYLFKNSGKICSRNDIVDFLWDNQLYVDDNALSVNITRIRDKLAAIGLVDFIKTKHRQGYTLMFQTTLFLLAWYSLTTTLFQAVQSDVLLSDCKSFFHDAASFIQTFIGWTIEVGQSVAQISTKIPNPFIAGMVYWILLILIVGICVAGTGILAILIEIKVIELYREKCWDVITLLMILTSAAVIIYFGEAIKKALSVNLLLLFVLLQGAYVGLRCYLESYLEKRNYMAIFHYTVKIVGRSKGKSVISASAYLNGDVMKNEETGRISYYTSKKEVVYTRLMMCENAPPEWQIVPEENIKRFQKSVRYKRSEDKEAALEKFKITFQKQRLWNEVLKIEKNADAQLGRSFEFALPKEWNRQEQIQYTTDYIQKTFVDRGMCADWSIHDKGDGNPHVHLLLTMRPFNPDHSWGKKEVKDWDFLRDKNGNIVIDESHPNWWQDKKNPDRHGIRIPVLDENGIQKMGARNRLQWKRVLTDANGWNNPKNCELWRSEWAKVCNEHLPLHNQVDHRSYEKQGKLQIPTIHEGADARKIEQKFLAGQEIKGSWKVAENQIIKQQNTLLQKILDTFGKVSGALSLWKERLNDIRRKPGNYTLNGIHDWANRRTADLNGRNDSGNAEPGHPTLSYAGTESEIAKIKQRVIRAAQHFAKYRGTAFQDGRTENEDRTFGKRKSAMAEIGTETEQRKQFITETEHRIAELEQQIEKGRDIDERIQRIKERRTVGRTSPLDRGDTRRTGTERPAYRGTKDAAQRISDLEREIKQREQSREYSSIKERLEASRQSIAEREREAAKRKRHDRGMSRMAKSTKSYEARMLEMEKKEQESLEKAKRYAAQKKELLKRKKAEESKKRTHRLCQIGGAVESVLGAPIEEEDIPKLIGFLKRQEANGKFFSKAMQKEVNTDMEEVMTQRKIALSIEEAADYTGIGRNTLRQLVEWKKLPVLKVGRKVLIKTDILEMFMEANEGRDLRDRGNVKAVTRTAANMKDKELRKLIGSRIKQRRLELNLTQPYVAEKMGVTASTILRYENGSIDNTKKMVLEGLSEALHVSVEWLKGETDEYETDITDKRELQIRDAMGDILEQLPLALTKEEDAFSKDLLLLMLKQYGLFLDSFQFACKNFKGNAGQTDIAKTIGFESNEEYNEIMFLREITHTINAFNEMADIVRLYSKKPKTAEQRLANLLSEVLYEDSESVMAKGSVRKKGKKWYYRFYVEDASGNLVQKECVGTESKSETEKLLRQAMDDYEKKKFVAKADNLTVGQLLDVWAEEELKTGTLSNGTVENYLGTIRNIKKHPLAERKLKNVTSEHLQSFFDLLSFGGVHPDGKERKGYSKDYIHSFSAVMQQSFRFAVFPKQYITFNPMQYIKLRYQTDEVDLFSDEDMDGNVQPISREDYERLLAYLQKKNPAAILPIQIAYYAGLRIGEACGLAWQDVNLEEQCLTIRRSIRYDGSKRKYIIGPTKRKKVRVVDFGDTLVEIFRNARKEQLKNRMQYEELYHTNYYKEVKEKNRVYYEYYCLDRTQEVPADYKEISFVCLRPDGCLELPTTLGTVCRKVAKALEGFEGFHFHQLRHTYTSNLLANGAAPKDVQELLGHSDVSTTMNVYAHSTRDAKRKSVRLLDKVVGNDMREKKYHIYLTAEEQSRVIQSLIRLKNELLEQGRYTDAVDDVLCKVLAAKKKHNLFIMNNSLAEVHPELVSEWSEKNLPLTPDDITFGSNKKVWWKGACGHEWQTSVKARSNGEKCPICSGARVIAGINDLATLEPLLVKQWSKKNKIKPTEVSIGSHKKVIWRCEKGHEWEAVVKSRTINRTGCPYCSHNKVLGGFNDLATLLPDIAAEWSDRNYPLLPTQVTVFANRKAWWKCKDCGREWNTLISTRSGGSKCPYCSGYIFLKGFNDLQTTHPEIASEWSEKNLPLKPDEVNAKSRKNVWWHCKKCGNEWKSVINARVKGTVCPVCAEREVLAGYNDLAITDSQFLSEWDYEQNKLKPTEVSRTSAKRAWWKCRHGHSWSMKINERTILGKGCRICEQEYLSVFPAFALSYYSHMKGLKIELGSDRVLGIPLDTYIPSEQVAIEVNSGSEDMEILKEHLCQQRGIKRIKLPMKTNETEIAYAQRIKAAFQSVHIFITSDTEEDVGTIRNVFENWRNSQMLLNEIINEVGMTKRAVKYYEEKGLLSVDKDNNGYRNYTAQDVETLKKISVYRKLGISIKDIQSLLETGDKSILLRIYQEKVQEKVLKDSELEALKQFIDDGDADKANEALDYQTVENAIESLLPGKEWGDYFKSHFKPFLNVRLKTLEQKQALQNILEYCDETTLKVPFIMGIGAKMIGGIAQETRTADEMIAYYRDMSESEYERLKEKVWKGAKMKNGIMKYHPAFIAQRKMQKELQNKGYNDIFILNLMVLSPTYAEYKKALDNVNDRMCRELGLYYDSNYNLVIKKDNSKMKSLDSDKKAGKSGAVEEATANDNNGFFKDNAKIDFSNVKVEPLFEEEVDFDTFSKSDFRAVKVKECVAVPKSKKLLQFTLDDGTGTDRTILSGIHAYYEPEELVGKTLIAITNLPPRKMMGIESCGMLLSAVNNLKDSEDEELHLIMVDNHIPAGAKLYMATKRKDKSRVVLKTGEVQRKDGTYQFSWQDSQMKRRFVYARTLDDLREKEKRIQKDKCDGIKTEARYTTIDELFDLWANMKRGLKNNTFENYKYMYNTFVRPVIGSKRISTLKKSDIKKYYNYLVDERNLKPSTIDNIHTVLHQVLQIAVDDDFIRNNPSDNVLRELKKAHCFQSEKRRALTKPEQELFLNFLKTHPVYEHWYPVFAVMIGTGLRVGEVTGLRWCDIDMESGMIDVNHTLVYYDHRTEGSKSGCYFNVNTTKTPASMRQVPMLGFVREAFEQEKQKQEDLGLHCEVTIDGYTDFIFINRFGQAQHQATLNKAIRRIIRDCNDEQFLHSDEPDVLLPHFSCHSLRHTFTTRMCEAGVNIKVIQDALGHSDISTTLNIYADVTKEMKAAEFKGLDSYFKGMNTLKNLLSLNDDERLLAEVRTYQEKLISNAEEPIWERKWLTIEEAAAYSGIGRTKLRELSNQAGCPFAIWIGNKIHIVRERLDKYIDKQFRIMADTEKIIRKKYDVPIWHKSNLTIDEAVEYSGIGRERLRKLTSQEECPFVLHIGNRRMIKRRIFDEYIEKLTFLEMTENKIIIPIWKKSNLTVEEAAAYCGIGSRKLREMSDSEFCPFVLWNGSKRLIKRRKLDEYLDNAYSIMKEKMICRGDLFYYDFGDNSGSVQSGERPVLVIQADDYNQNAPTIIVAAVTSVIKKRYLPSHIILGEEFGLKKPSMVLLEQIRTVNREDLREYIGTVDDDKLFRQINATLKKTFGLWVYKLEGKENIRCLCPKCLNDYIHNPDYIVRRLDPFAKRKDRCDKCDGDGWDYVVTDRFSSKKEKRGSNDRKMTNKLTLTEQEELFAKDCKLINLKYEYNGYTGDEKWAIITELSVKELWEKYPLVIERYSPFVHLSIAQGEVIDDANRNEDKYAKRSSRTLDCYGYDDEMSSQFHKELAIMFDDPFERAEEERLELEREELRQCEIRKARIALSMLQPLQRERLMKNVCCGLSSRVIAKQEGVYYSSVDKSIAAAKKNFIKFYENLMKNRSILCCPDSTVLFLLLFYSIMLRAVLGLFPYLGKGFYVLMRLQTQVAPEIQKRLLLSRVEAESLKERDILCPTCGFRIQRVFSDATGHLSVKCQKCKNVHILNLAYFRRIRRNGYGRNCRRMSIYMSRAELEEISEGLITAYANKFSNRVIQSIDIEHFITEFLMLRIEYAFFAEDDAGRIGFLADGATPLLIHQDGKIIPFVFPKDTIVLDKFLLAEKEQGRRRFTMAHEASHHILSKMYAMPSEGCFHAEYDSERSYSKEELAQMFASVEWQADTMGASLLMPRRIIENALAKYNQSNPIKVYGDNTITSKDKAVIRRMAAYIGVSYTALVIRLRDMGLFEYHNILEYISNELNLGGVSQMRTLEGIRYLINLDSAEIQQNFAGGVAPPDKVESEVDTTMRSKSPELMSEIKKYIEDYYLQNRQSPSTTKIAEAVGIARGTAYKYLVEMAEKNMIEYDGQEIRTNVTRKYSGEQTQTPIVGSIPCGSPQYEEENIEEYVSLPTAIFGKGDFFILRASGQSMIEAGIDDGDLVVVKKQVEANDGDIVVALVDNQNTLKRYFRDDENKKIILHPENKKMKDIIVDECCIQGVACHIIKELMKKRLFSILLALCMVLCLVPTTAFAESETEETPVCTCETACTEETMNTECPVCGAEGALAENCGKYVEPAAEGEASQPEGEELQENQDSDMPDTQSEAALAQMSGEGENGIAVQSAGVAIDDTNFPDANFRAIVEHYDTNKDSSLSDTEIAAVEEIDCYDKGISNLKGIEYFTALRSLSCGRNQLTALDVSKNTALTYLHCSYNQLTSLDVSKNTALTKLYCYNNQLTSLDVSKNTALTYLDCWGNSLTKLDVSKNTALTYLDCGYNQLTALDVSKNTALTYLSCSYNQLTTLDVSKNTALTDLLCHNNQLTTLDVSKNTALTRLRCHNNQLTSLDVSNTDMKYLYCSVNIYQIIVGNDRTFDLSTLPGNFDVAKTSDWSGGKVSGNTLTVDSDKDTVTYKYDCGKGKSVTFTLKCVESADYAMVDAAIAKANALKKDDYKDFSSVEAAINAVVRDKNITEQSEVDAMAKAIEDAIAALQYKDADYSKVDETIAKANALNKDDYKDFTGVEAAINAVVRGKNITEQSEVDAMAKAIEDAIAALQYKRADYTKVDEAIAKANALNKDDYKDFSGVEAAVNAVVRDKNITEQSEVDAMAKAIEDAIAALQYKGADYTKVDEAIAKANVLNKDDYKDFSTVDAAINAVVRGKNITEQSEVDKMAKAIEDAIAALQYKDADYTKVDAAIAKANALNKNDYKDFSGVEAAVKAVVRGKNITEQSEVDKMAKIIEDAIAALEKKPVSTKPGTSDKSPQTGDTSNLALWIALLFISGGVAIGTTVVSRKKKYNREAYSLPDTSEYIYLHTTAELKQIFGENFPDDTESDFYEMEIGTAGLMRSYMARKCDIHFPLERKLSRFLTASMRVYRVPEEEQAKVLAFIQSLDIKAIATDVMYKLFTMLEMKYDFKLSKNNEMEETRMQVSDKLIRPLTEAKYLNADNVSRYRCIMRIFFEHYEKLKYWLYQEEVYEEMIQDPFFADYRMEQCQQDLMMLTEWKNLNTIQDTKKVASIEEFKNKKYRYQMTEYSVEVERLVIRLENLFIEGASLEPTLLERIRRSVERFPEMGERDKSEVYTWWTDLNNDFVRLNQNYQDYIRDLNSVRAEEMMHTKEFLVFKDRLIEYLRSFIKGLQRNVGVIEENLRLQSEELKKQVFEKVIDYELSIPRMEIEVSKEMIEQKIQGRYQSIYDWFVENEGQENEAGKLFDATNDIIRRITRYAAQLSEKNALGANRKEEYRKVAELFLRCQNVEEAHKMSAMVFGMECPQHLAGELIRETDSMNIGVYEEQPMEITLKPRVRTYREKSRRSAIRESAEQKQETRRKLLEQQKKETEKLRALEVDGKIYFNKLPVLEPRIREILLKWLSDAMESADFSARTDDGRRYILDRSQAGENCVVHCEDGNFTMPKLSIVFQEEVMKELEVLLSKRWILKSRDKEMYYKLRDALGELRKFTTEKMGCQIIDNFLLIKMEKIPVIPESFMGIMKFSSKEEYAYLCMLLMYLEDRDAQEQFILSQLTEYITANLPGDISDWTLYTNRRKLIRVLRFAVEQGIVGITDGKDEAFMDDEAGEVLYENTGASRYFMKSFSKDIMEYTKPEDFRESDWFEVDEDRGFARRHRVYKRLIFAPGMYKEDGSPEDFEYLKYYGGRLSEELEQLFDCQVHIHRGSAYLLSGDDCRMGSVFPGNNSISDILLLCFGKMRKKIENDEWKTAADESCCIDQIEFENLIKDVKKEYGSGFSKNYREMPEGEFVKSVIDEMEVWMFIRKDEADHQIKICPLTGKIQGSYPADYMGGRNDEMMNSRWQANKIGLINFWYYDEQEFPFVKGRMLLRGSNGSGKSVTMQSVVPLLLDGNMSPERLDPFGSRDRKMSSYLLEEDDGREERTGYLYLEFKRKDSDTYLTIGMGIRARKGKNLDKWYFSLTDGRRVGKDFFLYKDTGEKVTLSKKELENRIGAGGRVIDRQADYMEYVNHQIFGFETAEEYKEMIDLLIQLRTPKLSKDFKPSVINDILSDSLQPLSDDDLRPMSEAIENMDTMNMNLKNRKEAKQAAEKIQAVFLKYNQKLLYEKADRYEQAKIRLEDAETQQKEQEKKLDGCRQNIEKLKTEHQELDAKRESMEKERESLNKSDAVALKRRESELAAELEVQQKNLKGKKHFLELKQDQYKDAQNQIKAEEDRKYEKEKELEELIEEMQDEADTMAFEEHAFMKDELEKHPEEPYKFELHQQQYNHTKEKIHEGTEILVETDHLERQKDELIKDREKRIRELDTLQRKVSELEAVFVQTQNEWKENLYQWNGANQELVLEKELLRALSIFAESYEENSDFAEVRQKIADVWIGKNAEVESGISANRAEKETTERELEEVKAELSEWENQKEPQPERSEAVIRNRRRLDALGIPYQEFYKVIEFGNNLDEKECNRLEEALLKMRILDALVIDEQYKEQVLHLEQGCEDRYLFSCKNGQKDIQPERSLLDVLELNEEVNDIFSNQRLTGILGSIAYDNESMIAVAEDGTYRMGVLAGTVTGEYEAGYLGTKAREKHRQAKIEACRQRIAELEEILQQLEEMHRKLFERKDILRQEYENLPKDTDMREALQMMRAEERACEQIRRESDRLEEQIRELIENVKEKKKKALEIAESLYLTCSYDVFKEAKRAAEEYGRHLISLIAAHEMFLRSLEYLKERKEHLEDLDADMEQIRYDLFEIQKEIQRKTEEQTSIQEQLRLTDYEEIKDRLDACIKWLQVYPEKLRMCVSRQTHEEDEVGQLTLRLEDGRKRIEEYEKKTAYFSECYEQEKRLHYVEIPEEIPDDAGHVRSYLESDVKALDKDSVIRDLNKVYFENRGFLTDYHLMQNELFAEEEQTEFPAKRLDISARYQGVKISFSSLLTHLEEDIEELENLIKDGDRELFEDILANTVSRKIRGKINASNTWVQKMNSLMNDMNTSSGLRLSLRWRSKTAEQEDQLDTKELVDLLKKDYRLMSEEEASRLSAHFRSKVAEARRNARDSAGMISFYQIMKDTLDYRKWFEFQLFSQKNGERQKELTNSVFGTFSGGEKAMSMYVPLFSAVVAKYQGGREDAPKLISLDEAFAGVDNRNIRDMFRLMTEFGFDFIINSQVLWGDCDTLDALAIYQLIRPGNAKFVTVMPYLWNGHKKELLEHEEEVEQRGIELGMASENHMNESEQEELEKIKKECLAYFGQSPVWKKVLRGFREKYSSYGRFGGKVVLKNLKSQDIEELEGFFGKSFHGQKSVTVSAEKFRQALEVSRYKNMTPEWLLENFFEEPLLGKQEQKLLRQQEKERIWENFRKSYEGMPIETVEESLENIVKDSENRELTEWERLLRLGAEMYNHLPYRQSEKLYLAVFAAMLTGNPHAFDNGTADGNFLYQIIQMDMESRSIKIEASEIFPAYKRQKSYLMAGIMLDDISNYAMLYQVQAVKKDGSIHQGMAGFAREQHIVQVPLAVISEWELLRCSQDEIYIVENPSVFAVLCGKEKEKNTRRAYMCMNGQPRLAGLMVLELLAKSGTKVYYAGDLDPEGILIAQKLSRYYKGEFHYWHMETEDYEKCKSEEVISPKRMKILERITDDRLKPVVERIKAYGTAGYQEMLMEETKMMIRDAKEKDIPRILKLLEQVLQIHADIRPDIFIPGTTKYTIDELREILKNKEKPIFVAVDEADVCVGYAFCQLQEQPVSNNMVPFKSFYIDDLCVDQEARGQHIGESLFEHVKKEAKQRGCYEVTLNVWTGNTSAEKFYERMGMRTKKRQMEYTDLMTTNHLILDFSHVYCDEKIPKNDKVHWLDCSDITECDLYCSKRAEEEIRARIAPYGIHGIHFLDSGNYHYVTGIMTALIKQKFSLILLDHHTDMQKPMIEQMTSCGDWAGKVLKTNPWLQQLILIGPQESDILQIYREKEGLVSGAELQEKLITFSEEEIQSVDGENKISGIKRNLPVYISIDKDILDEEYSETNWSQGKMPLPVLERLLMPFLTSGNILGIDICGECQQGIPLPQYLEAEEINGETNKELFDFLMHYCRNFMGTRKKILSLLLMIVLLLPVGMGIHVEAAAETKQVDVLFTHDTHSHLNSFSTIVDGEQKEVGGFAKIKTLIDEKKKVNPDTLVLDGGDFSMGTLIQTVYDTEAAELRMLGFLGYDVTTFGNHEFDYRSKGLANMLKAAVKSGETLPVLVVCNVDWDSMEQAGLSDGQQQIQSAFETYGVKDYVVLQKGNVKIAVVGVFGTDALKCAPTCELIFKDPVEAVKETVEEIKKNEDVDMIACVSHGGTWEDESKSEDEILAKAVPDIDLIISGHSHTELKTAICHGDTYVVSCGEYGRNLGSLSMTQKADGRWEMTDYTLIPVSSDVEPDQATQERINALMDTVDTNYLADFGYTREEVLAENAVEFNSLDEMGTKHEELNLGDIMSDAYIYAVENSEYFDGDPVDVAVVPSGTVRDTYTKGNLTVEDIFNSFSLGIGKDGVPGYPLIDAYLTGKELKLVAEVDASVSDFMTTARLYCSGLNFTYNPNRMILNKVTDCYLTRKDGERIEIQDDQLYHVVTDLYTGQMLGSVMDLSYGLLSLQPKDKDGHPIENLEDYAIMEGDRELKAWDAIARYMQSFDDTDGDGIANVPEYYATIHGRKVVDDSKNIIDLVKHPNKFSAIIIMICLIVVVIIVLVIVLIRKLVRKARKMIISNQQDNEMEHLNKRIQTVAVLGAGAVGCYLIAGLAPKLGENLWIIAEGSRKERLKKEGLTINDCQLSLCVKTSQEAKGADLLIVAVKYGSLEGSLDAIEQIVDDETIVMSVMNGVDSEEIIGHRIGMQHMMYSMIKIASERTGHCVRFNPEVTEGVYFGEADGSLSWRVAAIENLFNDSGVRFHITEDILKKIWAKYALNISMNLPQAIIGCGLGGYRDSAYVMDISTKLKDEVVAVALAGGIDIREEKAASFDSRTVSPKARFSTLQDLDAKRHTEVDMFSGVLVRLGKQLGIPTPYNALALDIIKALEEKNDGRFDYQMKKRVITGMMTASVIVSLAGCGAGQKETVESTAPATMTETVAASQVETAEVTETETTVQADRASRIKAYQAALENIYQNHILPDGSELRDDISGEMSGNKFAVYDVDHDGREELVFCYTATSMASMTAKIYDYDEASGELYEELSQFPMLTFYDNATIGAGISHNQGYAGEFWPYTFYTYDAANDSYRAEYFVDAWDKSLSDVNYNGEAFPDDADKDGDGIVYYLDAPDGSETGEPLDRDAFDQWISENVGNEENIPFLDLTEDAIRQIQMEQREIRKLVNRQRRFFYTGKTQHMAFREMALRRLQISIMAHEDEINRALRLDLGKSASEAYMCETGMVLAEISYMLKHMRQFGKDQTVRTPLAQFASRSFRKPSPYGVTLIMSPWNYPFLLTMEPLVDALAAGNTAIVKPSAYSPFTSEIMAKIISECLPQKYVVVVNGGRKENQWLLKEKFDYIFFTGSQAVGKEVMAHAAKHLTPVTLELGGKSPCIVDETANIKLAARRIVFGKYLNCGQTCVAPDYVYCAASVKDALVDEMKKQIRKQFGDDPLANADYGRIVNEKHFRRLIGLIDPTKVVAGGECDSTLLQIAPTIMDQVTFEDAVMQEEIFGPILPVMTFHSLDAVISQINRREHPLALYMFTESKANADRVMTNCGFGGGCINDTVIHLATSEMGFGGFGESGMGAYHGKTGFDTFSHYKSIVDKKTWMDLPMRYQPYNKVFDFLIRLFMHMVIAKRMEPLVTGSSIIRKLFEEGKEMAKKVGAENVYDYSLGNPSVPAPDAVKSSIIKILDTEDPLFVHGYMSNSGYEEVRQAVADNLNERFQWQYKMEDIIMTVGAASGINDILNLFLDSGDEVVVFAPFFGEYRNYVITAGGALKAVPADTETFQINIDGLDAVITEKTKLIIVNNPNNPTGVIYSGDTLDQLQKALERAEARIGHPLYVISDEPYRELVYDDNELPFMPAHVKNCLIVYSFSKSLSLPGERIGYIAVSPKMDYYEEVKGGLITTNRIGSVNAPSLMQLVIKECLNERPQIEVYDQNRKMLYEHLTALGFECLKPQGAFYLFVKSPIEDYAAFVEEGKKQHILMVDASSFGCPGYVRLAYCVSPEMIKRSFPAFERLAEACKAMRMKAWQDKIRSVVPYTPGEQPNRPNMIKLNTNENPYPPAPGVRDVLDHFDEDRLRLYPDPTAGTLVGALADYYHVRKDQVFTGVGSDDVLAIAFMTFFNSDKPIFFPDITYSFYPVWADLFKVPYETKPLKEDFSICPQDYYPANGGVIFPNPNAPTSHYEDLSVIREILDHNQDVIVIVDEAYIDFAGESALSLLDDYENLLIVQTFSKSRSMAGMRIGYAIGHPELIKAMNDVKYSFNSYTMSQTALALGVEAVRDDVYFKACTAKIRATREKAKQAFTDLGFTYPEPGANFIFVTHPDYPAKELFAALREKDIYVRYFDKPRINNYLRVTIGTDEQMEALFAFLKEYMNRMSQKTVTVSVRRLVEFILRSGDIDTVSGAFGEMDAMQQGGLMHRKLQKEAGPSYRAEVSLKHTTEMDETLAITVEGRADGVITETEMAADESGELGLKEVVTIDEIKGTYRNLRYITEPVPVHLAQAKCYAFFYAEKEDLEEIQVQMTYVHLKTGKVQRFRKKMTRNELEVWYTELIDRFAVWVRHQIAWIKKRNLSIGAGSFPFEYRESQKKLVSGVYQTILRHRRLFVEAPTGTGKTISAIYPAVQAMGNGLSETIFYLTARTIARTVAEDTFGLLQDKGLTMKVITLTAKEKICVLDKVQCSPEYCPRAKGHYDRINEALYDLVTQEDRMTRECILAYADKHQVCPFEFQLDAALFADAVIGDYNYVFDPNVALKRFFSDRSGDYLFLIDEAHNLVDRAREMYSAVMSMTELTHARHAVEDKAVDRRLVTYMDRSILAMSALRESSDESCQLMGNIGSLIVYLTKLSEQLEETLKEGVTAPLREVLMEFYFDIRRFICAFDRSDDRYLIYALRSEDSFKIKIFCVDPSKDLGERLAKGCGAVFFSATLLPVQYYKEMLSDTAASDYDLYVDSPFAEENRLLVAATDVSSRYTRRGRKEYERMAAYIRDIIRGKHGNYMVFFPSYQLMKDVFEVFTEMELMKAGHGLQLVVQESEMSEDARQKFLDAFQADAADAVIGFCVMGGIFSEGIDLKEDRLIGVIIIGTGLPQVGEERELLSRYFNEKSGRGFEYAYLYPGMNKVLQAAGRVIRTEKDRGVIALLDERFNYSQYRKMFPREWHNCSKTSLNTIVQQVEDFWTDKAMRIGFIGLGIMGEAMCYNIIRKHDGDVYIYDVKTEPVQRLAEKGGIACDSAVDAAKHSDVIITMLPRSEDSLSVYKEILPAVNATKICIDMSTIDPSVSLKISVMIQAHGGHFLDAPVVKSKAAAVLGNIGIYVGGEKEIYFQVKPILQYMGSNVLYMGSSGKGIGMKICQTTLLAQIQNGVNEALAMAVKQGIDVDRFTAALSFGGGQNAYFDERQMAIRNKDYATTFSVRNMSKDIDICRRLAKTEGVQAESLEGIREVYDRALEAGYGDKDYSSVIDMVFEKNYVKYKPKLMTITICIGSSCHLKGSRTIIQKLEELITERQLNDKIELNGSFCMGECSNGVCVKINDELFSVSPETVNTFFENEVLRRLMGVIGFRKAKCKDCYKCVRLCEVKAIRIKDEHAQFVASECVECGQCLEACPQNAITFIKDIQWIKSMVKNREKTVVSLAPAYLGVFGDADPNQMAAALHQLGFTYVHETAEAAGYVVQEYMNYCDRSDKDAVLLTSSCSAINNLIEKYHPDMLPYLLPVVTPAIAHARMLRAQYGPDVKIIYISPCVSDGGDALKDPRTKGIIDAVLDFATLREWLRNEQIKIPECPSSHMDSMDPKVMRLFAVSGGILSAIKAAKGRKYKHKRLYVSGIGPCEELFECIRNGEIKNCVIELNSCTGGCINGPMTGGKKRDRFRSKISVSQKVDEHEAPELPPLPEGVSLYKEYTARCEKRIVPSDEQIRAILSKIGKDSPEKELNCGACGFPTCRDKAIAVYRGKTQLTMCIPYMYEQAKGMSDIILAVTPSMIIVVDKDYYICEFNNAAEVAFGVSQQKALGHPVSEFISTEYFEKVFREKRSIINQRVDYDAYHIKTMQNIIYMREQEKALVIMRDITEGVRKQEQLRKVKLDTVAMAQNVINKQMMVAQEIAGLLGETTAETKSTLRKLRDTLMDSDEDIKIMNVSLDVCSKSLNKREEELCGDTVEIVKTTDADIIILSDGMGSGVKANILSTLTTRILGTMLKNGETIEDCVETIAMTLPICKVRQVAYSTFAILQIFRDGRAYLVEYDTPACIVIRDGQKLDIEHTERELSGKIIREYRFNIQEDDYFVMMSDGVTHAGVGGLYGFGWGRTRVGEFIQQRFNDTKMTAARLASYVINECSQLYHQRPGDDTTVVVAKVTARMDLNIFTGPPTKREDDESAIREFMRSQGLHVVSGGTSATIAARVLNKHIKASLIYEDPDIPPTAEIDGLDLVTEGVLTLNRAVSMMHEYNEGRQDQSFFKRLDEKNGGSQLAKLIIERCTHLHLFVGEAMNPAHQAAGLPFDLSVRMRLVDKIVEEGRKMGKTVSVKYYMKTTFITDINKIKFEVNTEVARLAFAGELDEKANEIPYKLIPGRTPHYRCCVYREREIIRERVQLAMGRSAMSGQKNKNIVQVIEAACEGCPINRFNVTNNCQMCMAKKCLGACNFGAIKFEGGHAVIDHKKCKECGKCAEACPYNAIADLMRPCKRSCPVDAITMDEDNIVVINEEKCINCGQCVINCPFGALSDRSFMVDVIKLISSGAPVYAMVAPAIEGQFGPDVSVGMIREAVMKLGFRDMYEVSLGADFVSKNEGQELLEHYEAGEKMTTSCCPAFVSLIKKHYPQVLKYMSTTVSPMTATGRLIKAMHPDAVCVFIGPCIAKKSEVIDSITFGGADYAMTYEELASMFEAKNIDPEECTETLQQGSKFGKQYSVSGGVTAAVLETFKEANKEVDLKVKTCSGALECKKALMLLKVGKLPEDFIEGMACVGGCVNGPAMLGKSRTFLKDRNGQIAKADDRGVLENVAQYDEYGINMTRNHQMPGLKYSRQRESIINCLKGRKDHPTADMIYASVREEYPKISLGTVYRNLSLLVDQGEILRFSCGEGQDHYDADTSQHYHFVCKKCRAVSDLHMPPLEHIDVLAKDGFDGEIDGHFVLFYGTCGKCKENEKNSMKKWVCTVCGYVYEGENAPEFCPVCKAPASKFKEQSGDKTWAAEHVVGVAQGAPEDIMADLRANFEGECSEVGMYLAMARVAHREGYPEIGLYWEKAAYEEAEHAAKFAELLGEVVTDSTKKNLEMRVDAEHGATEGKFDLAKRAKALNLDAIHDTVHEMARDEARHGKAFEGLLKRYFGMAESFINQVKRTSSIKTYEYEDFLIKGEVKNAKNMITKAIKVQKSHITWCYAHDDYDNFTSLRNDIDEPYPYTKNYKNDKSHIRIGGYCDLDFWPLQRYLMTFADELRSSKGPQLAKEEIAGRQYWLNFHVKAVLEELKRLARSQNNAGKYSVSGYLAYAGYDKNYWRLLPIKDKLLPRDDIGAGSFGVKDVCYSNCINDLRSEIEKGLKQLGFKASVKKVDVPFYKETEGFLCRKKLEKDGTDTTLRIDFSWMIITILLAGLLLILAAGIRCGFALDDLIRMAVNGIKKAVNVLSVLAIVGILTAMWRADGTIAYIVSSAAGLFKPSILIVTIFLMNCLVSFMTGTSFGTAATMGVISMTIAGTAGVNPVISGGAVISGCFFGDRCSPLSSSAILVASVTETNLFDNIRNMLRTAAVPFALTCIIYGAIGLCGINQVDAASISDVFAKEFQLNRWMILPAVIVLGLSMLRVDVKKSMTLSIVCAVILCVVFQHRSAAEIIRIMLTGYRAGDPVAAQMINGGGLLSMKKVLMIVCMTSTYSGIFSGTGMLDGITEYVKTISQKTGRFLCIVLLSVVTSMVGCNQTIAIMMTEQLGCVLYKEQENSQRAVDLEDSAVLISALIPWSIAGAVPSATIGAPVYCLAAACYLYLIPICRLVRKKNIFPGCNNMPIKIQDDLPAKSVLEDEHIFVMTETRALSQDIRPLKIVILNLMPTKIETETQILRRLSNTPLQIEITLLQTATHESKNVSEEHMIAFYQEFDQIKDENYDGMIITGAPVEMMPYEEVEYWDELCEIMEWSKTHVHSTFHICWGAQAGLYYHYGIPKYILDKKISGVFSHKVLNKKSRLFRGFDDTFYAPHSRHTEVRAKDIEKVPELRIMAASEEAGVYVVGSADDSQFFIMGHSEYDVDTLAKEYFRDAEKGMNPEVPKHYFPDDDPTKQPEMKWSAHGQWIYSNWMNYFVYQTTPYELKNGVFVPVEMTEDYKGLSGSEVSQRVEAGKVNTTTNSISRTKKEIFRAHLCTFFNFLNVFLGALVLMTGQIKNLTFMFTIIANSVIGIIQELKVKSLVDKLSVITASKATVIRDGTKKQIPLDELVVDDVMVLESGDQIGADCVVLEAQGIEVNESMITGESVAVKKHEGDEMLSGSFLVAGSGVARVIHVGSENYATILAAKAKDKKRATSEMQDSIGRIIKIVGFLIVPVGILLFLSQRAIEGTTTSDAIVNTVAGVIGMIPEGLVLLTSVSFILGVGRLARKQALVQEMEAIEALARVNVLCLDKTGTITTGDLEVVEVVPCGTMSDEKIREVMNEITFAFNDVNPTQQALMNYFEKTQKWQTTDLIPFSSARKYRAIAFGEHGAYVLGAPEFIMKNDEELLKKSETYALQGYRVLLLAETNQISSADGTVGTPKPAALIVISDCVREEAPSTFAYFEAQHVAIKVISGDNPATVSQIAQKAGLKDGDKYIDASTLPESFDELKNVVKNYTVFGRVTPEQKQRLIKAYQANKSVVGMVGDGVNDVLALKDADCGIAMAAGSDAAKQVAHIVLLDSDFVHLKEIVSEGRMIISNIERVSSLYLTKTIYSLLLNVIFILLGRSYPFVPIHLTLISTVAIGIPSFILALEQTETVTQSGFLKHVLRVALPGALTMVLNMLLIQGISIVLGFDSGMTATYNLIVAGMVSLMVLMRVCNPMNKIRSILCNTMIVIFVACVILFPDLFSINSVFSWRMIFIAPLVIFTYYSMKYLSAIVHFLLRKHIMDIKTFAKEHFEEYQALICKLTSIPAPSHHEERRAAFICEYLHQLGYGQAFIDDAKNVICEIKGSDLEAPVHIFMAHTDTVFPDETEIPVVVEDGCIKAPGVGDDTTNVCAILMTLKYLSEKQIVPKQTMVFALNSCEEGLGNLKGCRALVKQYTGRIGQLVSYDCGYNAGTVWAVGSRRYEIRIRTTGGHSYADFGATNAIAVAADMIHDFYEIDTNTMPGKTTYNVGLIEGGTSVNTIAQDVKILYEYRSDRMMGLELMEREMSVIVDKYTDREDARVDIEMIGDRPSMGQVDKKKMTELQKRAEGIIFRNTGVMPMFGSGSTDCNIPLSMGIPAICFGVYLGGGQHTREEYVRIDSLETGLCAAMEMICEDMTNPLMITAGLSYSLWKVDSRGECFGKKDMMSEGYYISQMKKNVLKYKLMKINRMAVVQGLNLEPVPGQLRYGCGMTDFEDFYDIAEYVNEKAYLGNQIVFGDYETGAVYIPFEKERNIAYGGVEWIEGYFYFLKADFSKKTVTIMQYRPDWDCKEYFSIGMAEVELYNLRIVGTPAHLISQDEEMRCYYPEQFSIKLSARESVIEIVDNHIYCSCWEEEGVAECEITEDYKYYEKLIVRNRFGDVMSEEPGALTRLPNGQWWLSMHTLKKFIHYYGPYKVVFFIDLLCAAIISLVDLSYPQILRTATKTLFTQDKSMILHVLPWIGIGLFLMYVIQSLCKYYVSYQGHMMGANMERDMRQQLFEHYEKLSFSYYSQNNSGQMMSKLVSDLFDISEFAHHGPENLFISLIKIVGAFIFLFVINRKLALPLIFLVIVMFFFSFRQNQKMQRTFMENRRKIGDVNASLQDTLAGIRVVQSFTNEDIEKEKFRRSNQAFLVSKKDNYRCMGEFMSSNLFFQGMMYLVTLVYGGFLIANGEMSAADLAMYALYIGIFISPIQILVELMEMMQKGLSGFRRFLDVMETVPDIQDAPDAVDLANVKGHVCYEDVSFHYSDDETTVLSHVSIDIPAGRSVALVGPSGGGKTTICSLLPRFYDVTDGRITIDGHDVRTLTLKSLRSRIGVVQQDVYLFSGSIRDNIAYGKPDASEDEIIAAAKRANIHDFIMELPDQYDTFVGERGARLSGGQKQRISIARVFLKNPPILILDEATSALDNESERWIQHSLEELSRNRTTITIAHRLSTIKNADEIIVLTENGIAERGTHETLLDKNGIYAAYYNLTMDNEKIFKNELKKAHIESINLWHHMKIRTATINDLEAVAAVEAECFPAAEAATKEEFAERIKFYGDHFWLMFDADKLIAFVDGFVTDHPDLTDEMYENASMHNEKGAWQMIFGVNTIPSYRQHGYAGELIRRAILDAKSHGRKGLVLTCKDKLIHYYASFGFVDEGISESVHGNVVWHQMRLTFMIFCFSGTGNSRYIAQRIAEALQKTVIDLNARIKDNDTATVDTGSDVIMVTPTYAWRIPKIVSEWMAKTKWTGAKRIWFVMDCGSEIGNAAKYNRSLAEQKQLHYMGTAQIIMPENYIAMFNAPQVNEAQQITAKAEPDIQAAIKCIQKKQEFPVPRNNLYDRLMSGPVNPIFYKMIVKADDFKASEACTGCGLCVRKCPMNNIQLREKKPVWGKNCTHCMACICYCPTEAIEYGKKSVGKPRYQFEKLTGVKMEIKLHYQEKGEGEPMILLHGNGEDGSYFAHQMDYFSRNYRVIVVDTRGHGQSPRGTAPFTIAQFAEDLHDFMDELDISKAVILGFSDGANIAMKFVLKYPERVKALILNGGNLNPKGVKPITQIPIEIGYRIASKFASKSAGARKNAEMLGLMVNNPNIEAEELSKITVPTLVISGTKDMIKESHTKEIAKALPNAKLAIIEGSHFVANQNSKVFNRVVEQWLSVVQHERMFIQPDHTYRDIQEKSFQQWLDEMEQHEDLAVSGGVKLAREYVQYLKDEIKRQEESNQLKIDYMKKLKNGRMASSPVPVMPAQVSAASYGRLQLAVTGRNDYTPIENAVIQVTDTGNPDNIIEELTTDNSGETPTIELPAPPVSYSLESSSAQPYSEYNFTVQAEGYSNLTISGAQILANVTALQSARLMPLANIEASPIVVPPHTLYGNFPPKIAEAEIKDVSESGEVVLSRVVIPETIIVHDGPPTDTRAANYYIPFKEYIKNVASSEIYATWPESSIIANCLAIISFTLNRVFTEWYRNKGYDFTITNSTAYDHFFVYGRNIFENISETVDMIFSNYLSRPGVLQPILTQYCDGRRVSCPNWMSQWGSKDLGEQGYSPIEILRYYYGDDIYINSAEQISGIPSSWPGYDLTIGSSGQKVQQMQEQLNRISDNYPAIPKIAADGIYGNQTAEAVRTFQKIFNLPQTGVTDYATWYKISQIYVGVSRIAELNMFIFAKLENAYLYKILHFLFIFINLKKEVSCYCLFYFMKAFLILADGTVYEGESIGSTREVISEIVFNTSMTGYLEILTDPSYCGQSVVMTYPLIGNYGVCYEDMEDPESYVDGYIVREISNSPSNFRSEDKLEKFLVDHDIAGIQGIDTRALTKRLRNYGTMNGMITTNENFVLEEVLPKIKAYKVTDAVKRVSCKEKTVLPGDGMKVALMDFGAKKNIAKSLNERGCEVTIYPAYTSAEEIIASNPDGIMLSNGPGDPKDCGPIIEELKKLYATDIPIFAICLGHQLMALANGADTRKMKWGHRGANHPVKDLTTGRVYMSSQNHGYVVADKTVPENVAEISFINANDASTEGLHYLGKNIFTVQFHPEACPGPQDTAFLFDKFIDMMEVNKDAEEMPKNNSIKKVLVIGSGPIVIGQAAEFDYAGTQACRSLKEEGIEVVLVNSNPATIMTDKQIADKVYIEPLTTEVLKKIIKKEEPDSILPTLGGQAALNLAMELDESGFLVENRVRMIGTSSQTIKKAEDRLAFKETMEKIGEPCAASEVCTTLQGCFDFAEKNGYPVVIRPAYTLGGSGGGIAHDAQQLHDIASNGLRLSRVGQVLVERYIGGWKEIEYEVIRDSYGNCITVCNMENIDPVGVHTGDSIVVAPSQTLGDKEYQMLRTSALNIIQELDIHGGCNVQYALNPNSFEYCVIEVNPRVSRSSALASKATGYPIAKVAAKIALGYALDEIKNAVTGKTYASFEPALDYVVVKIPKWPFDKFITAKRTLTTQMKATGEVMSICQNFEGALMKAIRSLEQNIYSLDYGKYHELTDEELKEHLYRIDDRRLFCIAEAIRRGYTLEEIHAINKIDLWFLDKIANLVKMEQRLKTEPMSVELMKEAKRMEFPDKAIAEFTHQSEAEVKAYRYRNDIVAAFKMVDTCAAEFESETPYYYSCFGNENEVEVGEKMRKKVLVLGSGPIRIGQGIEFDYCSVHSVWAFADCGYETIIVNNNPETVSTDFDIADKLYFEPLTPEDVENIVRLEHPDGAVVQFGGQTAIKLTQAIMKMGVPIYGTQAEDVDAAEDRELFDEILEKCKIPRPAGTTVFTTEEALKAANHLGYPVLIRPSYVLGGQGMQIAVNDGDIVEFMNIINQTVQEHPILIDKYLMGKEVEVDGVCDGKDVLIPGIMEHIERAGIHSGDSISIYPAQHLSDAVIDKIEDYTAKLAKGLHVKGLLNIQFIVYQEEVYVIEVNPRSSRTVPYISKVTGIPIVDIASKCIVGKTIRELGYEPGLQKKADYIAIKQPVFSFEKLRGAETSLGPEMKSTGEVLGIAKTFEEALYKSFIGAGINLPRTKKMICTVNDADKDELVPIAARFQKLGYTIYATRSTADKLIENGIPAIKIKKISAGSPNALDLILAGEVDLVIDTPTQGRDKSRDGFLIRRNAIETGCTCLTSLDTAAALVTSLENANMETLSVIDIAEIMAKYTKKDIIQMVEDDDVEFIRLQFTDIFGALKNVAITASQIEKVLDNGCMFDGSSIEGFARIEESDMYLVPDLNTFEIFPWRPQQGKVARLICDVYKPNGEPFEGDPRYILKKVIKEADAMGYTFNVGPELEFFLFHTDDYGMPTTETHEKGGYFDLGPIDLGENARRDMVLTLEDMGFEIEASHHEVAPAQHEIDFKYTDALHTADNIETFKLVVKSIAKRHGLHASFMPKPVYGVPGSGMHINMSLDDQDGNNIFGDPNDENGLSKEAYYFLAGLLKHAKGLMALTNPLVNSYKRLVPGYEAPVHIAWSSINRSPLIRIPATRGTGRRIELRSPDPAGNPYLVLAACLAAGLEGLKEKKMPMPNVDKNIFEMTAAEKAAESIEELPLNLFDAVKELEADQYICDTLGKHASSKYIEAKYAEWDEYRRQITNWEIDQYLYKIMVNIIVVFSSQKDGINIRNLLMRHGHNVVTVCTNGAAVSQAVDQMEGSDGIVVSGYKYQDMTYSDLLADLPDTWQMIVMASQGNLSHIFEYNVIKIPMPVKVYDLFTTLQAIEITIIRRRKKRREKPKERSSAERALLEHAKSLLMETKNMSEVEAHRYIQKCSMDNGTNMVETAQMVIEIYSQAMENEFSNRISVKNIVLAGMFAAFLAVMSQVSLPMPTGVPITVQVFAVALVGVILGWKRGVLAVLVYILIGAVGVPVFANFKGGLSVLTGLTGGYIIAWPVMTILCGIQPKTQNAKLNMTVNIILSLVGLAVCEGVGALQWALLSGNDLRGIIIYSLTAFVPKDIVLTVLAVIIGRQVRKMAAKAGELMTLRDLQMGESAVITTVGGRGALRQHFLDMGMIPGVQVTLVKYAPMGDPMELRLHGYELTLRLADAEQIEIEEVQKAGAEHEASKAGKGGRLKESGRFTDHPGLGEGGKYHEKETEHPLPDGTTLTFALAGNQNCGKTTLFNQLTGSNQHVGNFPGVTVDRKSGVIRGHENTLVTDLPGIYSLSPYTSEEIVSRQFILDEKPTGIINIVDATNIERNLYLTMQLMELDVPMVLALNMMDEMRGNGGTVDINEMETFLGIPVVPISAAKNEGIEELASHALHVAKYQECRGRKDFCDESDHGGAVHRCLHGIMHLIEDHAIQAGIPVRFAATKLVEGDNGILEALKLSQNEQEMLEHIICQMEEERGLDRAAAIADMRFSFIQHLTEACVVKPHESKERERSRKIDQILTGKYTAIPSFIGIMALVFWLTFNVIGAWLQGLLEQFIGWLTELADAGMTAWNVNDALHSLIISGIFNGVGSVLSFLPIIVTLFFFLSLLEDTGYMARVAFVMDKLLRKIGLSGRSIVPMLVGFGCSVPGVMASRTLPSERDRKMTIMLIPFMSCTAKLPIYGFFTAAFFPEYSGLIMVALYFGGIAVGILVAMIAKNSIFKGDAVPFVMELPNYRMPGAKNVLQLLWDKAKDFLQRAFTVIFLATIIVWFLTTFSLHLNMVTESKDSILAGIAGVIAPVFAPLGFGDWRISTALITGFIAKESVVSTLSILFGTTTALTSLISTKAAAALLVFCLLYTPCIAAIASIRRELGQKWAIGVVILQCAIAWVCAFAMYHLLMFLMTYFTLQAAFRKVPGRQLFTLLTQMRTLLNSFRSVIDRENELMRTAEELRNELRGMDRRSYPAYKALAGTWQFEKYRLTIDHVQGDPFASPSSLHVELSHRQARIPERYYENPYAKTALRDYIVREAGRQFEKCNFKARGSGKSGLMSISRCGQEVLERSACEIDGEGIILRFHVGFPAFGRTIQAKELEKILFDFLPECIENAMCWRRLDHRAVEQAVWLAEDQEALRKILVERQWVAFAANGSVLPRKSGVSELPMTGSVPFTAPDSMTETVELPHRGKVTGMAVPEGITLIVGGGYHGKSTFLEALQNGVYNHIGGDGRELVITDNTAVKLRAEDGRSVRNVDISMFINDLPNGRDTTCFSTMDASGSTSQAAGVVESMEAGTRLLLIDEDTSATNFMVRDALMQRVISREKEPITPFIERMRALYEQAGISTILVAGSSGAFFYEADRVIQMDRYHVVDITEKVRNICGQNACGQHVMEQVQTAAFEMPVFDRKSPAAGHKREVTDTGRERGGRRGRHGSGAADRPRTMKVKIMGKEMLMLDKENVDLRYTEQLADSEQTTALAYFMRYLLEKAKSAQTVRESVSEIETLFEKKGWQAFCSGYVPCGLARPRTQEIYAVLNRYRGMLNQFSRTELLLGHDNMEKLKNVRVAVFGIGGVGGFTVEALARSGVGTLDLIDDDRVCLTNINRQIIATRKTIGQYKVDAAKERILDINPDAVVNTYKTFFMPDTADAFDFSVYDYVVDAIDTVTGKIMLVEAAQKAGTPIISSMGAGNKLDPTAFEVADIYKTSVCPLAKVMRRELKKRGIRKLKVVYSKEKALTPIDDTANSCRSHCICPPGSARTCTQRRQIPGSTAFVPSVVGLIIAGEVIKDLTVHMLNEEKIRWMTRASIYEKRQGHTDLERNEYFLGDYVRLHLMKNMIGVTVAYILMVGLYAVCKIEDIFALAANMQLMVFLKEVLLVYLILALIYTGIGIIYYAWQYQSSHKQLKKYYRILRHIDQCGEKNSRSQEDKRMTEIFVMRDRINRFVKEYETWFLIIAKFIGMMFVFSCVNSQLGYFEVLNNPMVNILLALICSIIPGSFSVFIVAAVIAAHMVKLSVLLAVLTVVVMLIVYLMFLKFAPGQSVVLLAVPVLMQYNLHYMIPILAGMYFSPYAVVPAVIGLFMVKFLGYACAAVSMTGTGMSINLEGATEAISTIFGQLADDKSIWAYAIAAAVTMTVVYLISQLSFDYAWYAAIVAGAAAEIIVTFFCAAAFGTELNIIMTNVGIIIGTLLAVFLQFMKCAVDYSRKEYIQFEDDDYYYYVKAVPKIFISEPEKNVVKMNSRKKAFASKEVQASKDHEEMNNWMKSLTNIGLPQSFHITYIVEILILTVIIYELLIWVKNTRAWTLLKGIVVVTVFALGSYFFHLTTLTWIMSKTAGVLVTVVVIVFQPELRRALEQLGRKNIIFSIFGPATVRAEEDRRSLDKINSEIVRAVYEMGKVKTGALIVMEKQVILNEYERTGIPIDAQISSQLLMNIFEHNTPLHDGAVFIRNQRIVAATCYLPLSDNMELSKELGTRHRAGVGISEVSDSLTIIVSEETGAVSIAEGGLLKRDVGQDELKKKLSEITQGIEEGKRKKLMGRIKNERKTDAMRERLTHNFGLKLLSLALAILVWIVVLSIEDPVYTREFSDISVTEVNGDQITEAGKAYSYVGGNTVSVKVKGKTSVVNRLSKDDLLAVADLSTLSITGAVMVDVSCPKYPSLEITPIGSSTVLKVEIEDLVEKSLNVKVNTNGKVSEGYYIGQGVATPNMVTVSGPESVVNKINEASVNVSIGSGNTTDVTTNTTLKLLDQSEGEVSSSTLNISQTDISVTVPIYETKTVPVDFGVTGQVAHGYKMVSAAYEPKEVTVAGRKENLDKISQVTLKDYDISGKNSKVEDSISIVQNLAEQLPDGVVFTDKEATVALVVDIQQITETSFELPLSKISLKGSNTAYTYQKSGPGSSDKAVTLKVKGISSEINSLTTDNLTALIDVSNYGEGEYDLPLTVIFDDNLELAADAYVHVVISKTSDEMVSVELQLQNPSGLHLRPAGILCKAATKFQSHITITTADGTEANAKSVLSVLSACVKSGDMITLSCDGNDENAALKELELVIRERLEELMLQHLSKRSGDLVAEAASDEHFVSAFPCEYPGGTPHFYTQNIDRCTFFCMLNYKRYKRVPVVHYPERQWPDKEIQKAPIWCSVDLRDGNQALIEPMVVEEKIEFFNLLVKLGFKEIEVGFPAASQIEYDFLRTLVERNLIPDDVKVQVLIQCREHLIKRTFEAIQGCKNVIIHIYNSTSTLQRDVVFNMGREEIKQIAVDGTKMVKKYMEGFDGNIQLQYSPESFTGTELDFALDICEAVKEVWQPTVENPIIFNLPATVEMTTPNVYADQIEWMSRHFTERDKIVLSIHPHNDRGCGVAASELALLAGADRIEGTLFGNGERTGNVDILNIAYNMFSQGINPELDIENVNEIIDVYERCTKMDIDPRHPYAGKLVFTAFSGSHQDAINKGLHAMEQRNSEYWEVPYLPIDPADLGREYEPIVRINSQSGKGGVAFVMDHYYGFKLPKVMHKELADEIQLLSERQGEVSPSQIMDKFREMYINAKYPLHFKKMRAEDISETTEGYDTKVVLTYTFKDELKTIEGFGNGPIDAVKHALCNQGGFNTKLTMYEEHALTTGSDSQAASYIELMNSETGEKAFGVGISSNITRSSVRAIFSAMNRLFFRKKMKKKLLAMLMIMLMCIPLSGTVTANAASSDYRSWAQWDSEWGSIHLGKSQYTMKSSGCLVTAIAMLICHTGSADASSFNPGTLVTYLNNNGGFTSDGSLYWGKVCGAADNFTLYNSRVSLANMTKAQKIAKMAEYVNNGYGVIVSVRNGGHWVAVDRIEGSTVYMLDPGDRNTDLFATYSESGVDRLAIYKGKNAGGTVSGDPGNTDNTTTPDKVIGTGTVNCSSLYVRSGAGTNNSIITAISKNTSVDILGEANDSKGTKWYQVKVGGRTGYVCADYITVKNSGSNNNNNNTETASGSGVVNCSALNVRSSAGTGSRVVTTISRNQAVTITGTAKDSSGSKWYAVSFTKSGKSYKGYVFAQYITLKSDNSSNGNNNNNSNSDNSTPATSIPAVVNCGALNMRSGAGTNYSVVTTLTKNTAVTITGEAKDSSGTLWYKITAGSKTGYVHSSYLTKKNAGGNSSNNNNSDTSTDVSGQTMKVAYDVVNVRSGAGTSKGVVTVVYQNEKVTVVGQDKDSSGNIWYKIKTASGKTGYIRSDLLKADSSNSSDTKSDSNNSNSGTESDLNGQKMQVKYDGVNMRSGAGTSKGVIEVIYLEDTLTVVGQDKDSSGNVWYKVKAKSGNTGYIRSDMLKQSSSSGSTASSDQTSDSTPTSGRVVDGWLNVRSGAGTSNKILVVISEGTKVTISESVKDGSGSLWYHITVNYGGVNYDGYVSSQYISKMENREQYKRLIMFFASALILLVQVVIFYYIWHRYYNYRSVIGALYWRRGNWALMGVYAFINFFFSKIFGAYKVGYLKVSDVIASQILAVLCCNGVTYMQLALIGRWRFSAYLEPIMQMTLYDVVAVIAWVIFMRWIYAKIYPPRQMLLVYGDINPKALIQKMTSRTDKYSIVDMINISEGYDAVIERISHYEAIVIGDIPSVYRNKFLKYCYANSIRCYSIPKISDIMIKSSTTINLFDTELMLFRNRGLTAEQRLLKRASDIVFSCIILVVFSPILVLVAVLIKLYDGGPVFYKQERLTYNHKVFMIYKFRSMRVDSEKTGAQLAKKNDDRITPVGHVIRSLHIDELPQLFNILKGDMAFVGPRPERPEIAELYKKSIPEFDFRLKMKAGLTGYAQVFGKYSTTPYDKLKLDLTYIENYTFALDLMIIIQTVKILFQKENSEGLDTGQKTALRTEDKKNMKHVEVSVIIPVHNGADYIAQAIDSALIQDVPLEIIIVDDGSTDCLAEALSPYMERSEITVLHNRHNIGVAESRNRGVRQARGEYIAFLDCDDWWEPGKLKMQLTLLRKTGYVLCASGRRLVTPDGRPTERIIGVKEKLTYRDLLFQNPVNCSSVVIKRDAATAFPMVHDECHEDYIMWLQILRHYHTACAVNQPLLNYRLSKTGKSGNKLHSAKMTFKVYRHMGFSMPKALFCFAGYMFNGIKKYYFHMAMNLTDSGSNMHSEEQQNPEQVAKFNITFRLYASTMKRKAYAILRDEGWAEDAVQWTFMKLLQHLNQIGDPYSIKARCYINTILVNNCFTLLKKNNRYYFMEDYTYQNDYRHSMIRADESLDNLIYRELLADVQQIPEMYSNLIILNGLYGYSPQQISELLDLKPATVRKRMQRGREMLQRKIEEKQKKNKKMSKRRKKKRSSKTKRWGIIFGIELVLILILIPVVFVYAKLSLIQTASASDVDKANIVINNDVDATTQKALKGYRNIALFGVDSRDGSLQTGARSDSIMVISINQETKDVKITSIYRDTCLKIPGYGFSKATHAYAYGGAELSMSMLNTNLDLDITEFATVDFGVLAKIIDAVGGIDLDISDAEYSLINPLIDEQNSVTGSDSEYISGPGYQHVNGTQATAYARIRKIDSDFKRAERQRIVLSKVFEETKSANIGTLLNIIDTILPEVYTNMTSTDLISLAKDIFNYNIADQTGWPFEKETGSLPSDGLSYVFADSLEQNVKELHEYLFDNEDYNPSSTVSDISYELYNETGYMAFDEQDRFDHTETDNHVNEQNQTAGTAQNEGTEGSGLYRMTREDLKNSTLYTDTDRRSEYTSGTAYENRTNTARTGSSYAAGNDYSYYHPTQNSGGNGGNGGNGGSGGSGNFHSGPEKHHSRKKGGFGKTVVKAACLGVVFGLAASAVMFGVNKATGVSASASGSGSPSYNVQIVKTSAEGVTTTDSNDVSDIVANVMPGIVAVNTTVESTSTDWFGRQYTQESKGAGSGMIISEENNTLYVMTNYHVVEGAKEVSVQFSDETTATATVKGYDEDKDVAVLTIDMSQLSDDTKKAIAVMVMGDSDQLKAGESAIAIGNALGYGQSVTTGVISAVNREVALTDKTMTLLQTSAAINPGNSGGALLNGKGEVIGMNTVKYSDTSVEGMGYAIPINTALETAKGIIDGTIVAKTDETTAFLGITGGTLDEDTASAYNAPAGIYVSNVASGSAAQRAGLQAGCIITGFNGEDVSTMEDLQKLIQNCAPGDSVTITAQFPDSNGNYTEQTLTTIMGSKADAGDSSQSTQQNGQNNGQGSRNSQGGLGQSNGQMSDYNNDDIKDTEDEQKYEDVCYMCRRPESKTGRMLHIPGMNNMCICIDCMERSFRVMDGSNYADLMQGMNIQDIFPGGLNMDDMMNIQNQIPKKQKLKKKAKDGEEAHPEFDIKNIPAPHILKAKLDEFVIGQDQAKKAIAVAVYNHYKRVATNTMDDIEIEKSNILMIGPTGCGKTYLVKTLARLLDVPLAITDATSLTEAGYIGDDIESVVSKLLAAADNDTERAERGIIFIDEIDKIAKKKNTTARDVSGESVQQGLLKLLEGSEVEVPVGATSKNAMVPLVTIDTRNILFICGGAFPDLENIVKERLTRHSSIGFSAELKDKYDQDKNIVSKVTIDDLRAFGMIPEFIGRLPITVTLEGLNRDMMIRILKEPKNAILRQYQKLLALDEVDLRFDDEALGVIADKAIARKTGARALRSIIEEFMLDIMYEIPKDDNIGSVTITKAYIEGKGSPMIAMRGTPALPESPSANNMAENYDDISCEDVIYSEDYRDYIKEYFQDFSSIAGTYHPVCIEAIGSRYAVMHLAGDTSMQNILSDYNISMLPALYGLLGTAGLEESGISYFHRSPYLNLRGSGVMIGVIDTGIDYRHQAFTYEDRTTKIYSIWDQTIRDGESPEGFIYGTEYTSEQINRALAAENSLAVVPSQDENGHGTFIAGVAAGRVIESEDFSGAAPDASLCIVKLKPCKQYLRQFYGTAADVPAYQENDIMAGISYCIQKAQEARMPVIILLGVGTNSGGHTGQSYLSQLIDDISGFSGVCVVTAVGGEADKRHHFLGVLPEDSAYTEAEIRVGAGERAFSLELWSIHPDLYTIGIQSPAGERIEKITPIAGRSQTIRFILDQTEIFVYYQMVESLSGQQVIFLRFDEPTQGIWSLRIYGNLAVNRRFHIWLPMTPFISDQTYFLRPDPDVTLSDAACASEGISVAAYNDTNNSLYAASGRGFTADYEIKPDLAAPGVQIYGPVPGNRFGTRTGTSMAAAQTAGAAALLMEWGLLKGNDLQLNSHKIIKYLTLGAVRREGVVYPDRAWGYGRLNLLKTFNELVTGRTMAFFDELKKNLSGVTDTVAKTSENVMKKSSTAIEIQKAKLKKVSLEGDMKELYASLGKLYFEEYADGDMPKEMAELCEKITSCQHAINEAEQRAALLKGVVICSNCQAEVDKDASYCPKCGAEIIHVVEEDENVDAASSDEVDDEVPDGADTEDSEGEAEEADAEPEESAEANEQEDEAAKETEEGEASDECTDNEMKSLKKLAGMIGLVILLCGIMTGCSGKRLYSEEELTQIHDVVGAVEQITKEFQYVIGGSMQSLLEDSSSRADLMDYVSTRKYDPDKKIIALTFDDGPSTADTNGTSDLLDVLEQYDSRATFFCVGNNINDKSGPLLKRMVELGCEVGNHSYDHAQLTKLDAKGVHDEIDTTNELIKKYSGRDCRIIRPPYGAADNDIVPANVSQPFIMWDVDTEDWKSLNASKVIASVERYRNQDWDGAVILMHDIHPTTVEACKTLIPELVNAGYQLVTVSELAYLKGVKLEPGKSYWGISEKSTETDYMADFKKEIERRRTFAIISHPDAGKTTLTEKFLLYGGAINLAGSVKGKKTAKHAVSDWMEIEKERGISVTSSVMQFNYKDYCINILDTPGHQDFSEDTYRTLMAADSAVMVIDASKGVEAQTIKLFKVCVLRHIPIFTFINKLDREAQDPFDLMEDIESVLGIHTCPINWPIGSGKEFKGVYDRQTRHIHAFTENNNGMKAASDKDLTMDSPELEQELGSELYERLVDDIELLDGASDELDMDLVSKGQLSPVFFGSALNNFGIELFLNYFLEMTSSPLPRMSDSGLIDTFSPDFSAFVFKIQANMNKAHRDRIAFMRICSGKFDADKEVYHVQGKKKLRLSQPQQLMAQERKVISEAYAGDIIGVFDPGIFSIGDTVCAPGKKFAFEGIPTFAPEHFAKVRQVDTMKRKQFIKGISQIAQEGAIQIFQEYNTGMEEIIVGVVGVLQFDVLKHRLLNEYGVEIRLEPMPHEYIRWIANKDEIETNKIIGTSDMKRIKDLKGNPLLLFVHEWAVQSVLDKNKGLELSEFGRWMARIAIVTDSNSGITQAEGKKLGVYVLPMPFDIDGQPFFEDINLTQEQFYEKLTGDADVSTSQPSPDAVISLWDDLMRNKGYDEIVHIPMSSGLSSSCATAMMLAQDYDGKVQVVDNQRISVTMKLSVLDAMKMAEDGLSAAEIKRILEEQKFNSSIYIMVDTLKYLKKGGRITPAAAALGTLLRLKPVLQIQGEKLDAFAKARTVKQAKRIMLDAIHKDIETRMGGEVNMDNLHIAAAYTPGEGVEQWLEEIRREFPDKEIVVDPLSLSISCHIGPGALAVTVTKKTEYMRTYTHVVHDLTPVYDEHSRILILGSLPSVKSRGQFFYNHPQNRFWKVLAAVTDHAPLENVEEKKQFLLEHQIALWDVIASCDIIGSSDSSIKNVVANDIGRVLSEASIRQIFVNGQTAFKLYKKYVLPETGVMPVCLPSTSPANAAWNMERLTEAWQVIVRESMKKRFLGMVTAGILATVMLAGCGASASKVTAESLLQEVQSKCDAMKSLETHTTAEITLESDALGGTMDMTMDMTMQTTIEPVANYLKGNISIPGLGTAMDMENYTVVQDDQILSYTGIAGQWMVSKMAYDKDSVERINAAAEDLLKSKDSLKLADETQDVDGTEAYMISGSISGADVKNLLSSMESTLGGLTGDTEMNLDDITVDFTYAVSKADKMPLYMDMVFSGLGAGEGDEQVTFSKFNMKMEYTNYDTVEAITVPQDVVDSAIDVTDYLNDLQNETSSDTESETAAMKATGIVRRIDDLGRVVVPKEIRRTLRIREGDPLEIYTDREGGIILRKYSPIGELSQFSKQYAEALAQNTGYIVSITDRDRHIAAAGSGKKELMQKEISRQLDNLMNQRENLLAVKGERKFISITEDGGENYTAQVIYPIIAEGDAIGTVILTTKDEKVRMGEMEMKLAASAASFLGRQLEQMSENQLYFAPMEGITGSIYRRAHHRIFGGVDRYYAPFIFTNPKGKISKKDLLEIAPEYNEGCWVVPQLLSNCAEDFIATAHTLKGMGYDEVNLNLGCPSSTVASKGRGSGFLGEKEALKAFLADIFEKTDMKISLKTRIGLNRADEFDDILDIYQAFPVEMLIVHPRIRMDYYSGKPDMEAFEKASARMPFPVCYNGDIFTAAAYGRVSEKYSDIRHWMIGRGLLSNPALCREIRGGDCASREELADYYHTMRDEYEVRLQGNKKVVFLMKEFWHYISWILSEEDRQEIDVLMHLRDGAEFFRKAEEIAVNCTVVKGQGFHSEMEVHKFMTLNLPFFRQLAKALAKQFGDNCEVVLHDLTSTDIEHSVVLVENGHVTHRAVGDGPSHVVLEAMKAMGARGSAPTDHLAYLTKTGDGRILKSSTIYIHDDTEQKITGILSINYDITSMLLAEQALKSLVANEDDKKEPESIPQNVNDLLEDLIRQSVTLVGKPVAMMTKDDKVRAIQFLNDAGAFLITKSGDKISNFFGISKYTLYSYIDVNKMLQLSDSILTQDLLTNNIIIHFVSERLADCVEPLLQYTPKKLKAYFPPRYKSAKMCPAIQDLYNLLKSNTAYIPPLILEYVLATCIHSTLVSQEDAGLPTIKYLSESDYKCICATINNEQPNIHKSELDSILNKIQDITYYKDFCFQNTQFYHLFFMTEHQLYRSGLIIRNGTAPKTDIIYEPGTIQYMGLIHTDATTLTKVQGSAVGIQPKCYDNGYWYKKNVYGCEDQSEHLASLVLMHSNITNYVFYATCTIDDVPGCVSRNFLLDNESFLSFHRLHELVRDGVALDNIIRTYDTCAERINYIKEFLYDTLEYDCSEYLSQILSLDALLLNPDRHFNNLGIVINNQTGKCRTAPIFDNGAALLSNYRDYPCDIPFEEHIQHVTAQPFSSNFIEQAEEAGIGLRLDYDGLYTKLLFEPHSRLLDVLYYQLEHMRDIIPDLESPKIPFIDYDSPIQDIMIQLSDYLTTQEPHVNELVSKFISKRLYDIIEPMTDYDIEGLKHFFPARYRHKKMLPVINDFCSLLKSENFYPLPLIMKYVLFKALLEEISYCEEFDIPTISTIPQHDEIKEILQKDSHELELESLDEFFVFVEDLEMYPESLYDDWDFEFLDDMTELQLYKSATNSYLGIGTKESIVYAPGTTAYMQSFKEVYEKYRGKRSDAAVAKKANLHKSTFSRIKNELIPPKRNYLWSLAMSLELTLDEADELFSSCGLCMASQYHLTDMEKEREGIIKDCIAKGKYSVVELNIRLYEAGYQLLGNKGANMDESYMREYFERNQEVFYMRFRKDESKWALEKERAQAVDSFREKYVHGNVMEADFEAMVNAIWNDDYEAHVLMFLYGAGEREKMLSMGSFVYMIARDDADIIEEKRPEFEERLEKVFNAAGMMEQEHLTLFGKGIRALRPVRIENGYTTFFYNYFEDDVWENAGYYNKNGGVYSEKVGWRNFARAIEAAYMLQMLYMQEPSFVVYNNELVPPWQYLQWFKNLFGTTYQLPEKDLMKLIEMLHEEERSYPEIYYSYNELICSGYYLESVIDAIAVVYGTARALELLKNALDKENSKKAGVNYPECIKNTVRSLEKFKGNSSLDDDGQVDYLMKKMRTMVETGTVGDQEDQGIMEILFWVRVSGSYAFAIKRISELYNRDFWELYAPVAGMNKKRSFSENLWSETQSLLISGISTAEFVNESPDDMLYYWTPDGDIEVSDDVEKWFSELRKQFDEYVAEWQQIPKLMRYIVDDLLFADRNYVNIRTFSGFLEETMDNISDVRYHILWRIFHDMIHDPDMLKEGSVIFDKESLANGKKKLRYSWKMTDTNLKRNKARMTIRRYLSLISNKELRRRVFGFMDFEYPVIDKKKLGSTLKRYMQDRGLTARDVQEYLGLACVQTVYRWTAGISIPTVDNLYALSRLMNISIDALVGSKSNMKAHKYWSVGALITMIGTFYTGYKGLKAAHKYFAFGSLICMIMAVYSGHKMISGNKRTRKQVKNTKAEEMLELGIKAPDFELPDQNGEVHKLSDYAGKKVILYFYPKDNTPGCTKQACGFSERYPQFTEKGAVILGVSKDSVASHKRFEEKYGLAFTLLADPERKVIEAYDVWKEKKNYGKVSMGVVRTTYLIDEQGIIIKANDKVKAADDPENMLKELAMKIILSPAKKMIVDTDNLAPVELPVYIDKTAEVLNWMKSKSKEELKAIWKCNDKIAEQNFNRLENMDLYNRLTPAVLAYEGIAFQYMAPSVFEIQQFEYLQNHLRILSAFYGILKPMDGVTPYRLEMQAKVGIGDANNLYEYWGELLYRSVIDDSRIIINLASKEYSKCIEKYLTPQDRYITIVFCELSGDKLVTKGTYAKMARGEMVRFIAENNIENPVEIQKFDRLGYSFRSDLSSDSEYVFERKIKMTSRRNTIQKDLVRNTVYEMRIHVTANEVYEFIKEAYPTIGKGTVYRNLDILVEEGALRKVEVPDGPNRFDFILKNHYHVRCIKCGEIFDVDMDEIPDLLERIHNTHGIEFLDYDISFKGICPKCREKVKMAANKYAGTQTEKNLQEAFAGESQARNKYTYFASVAKKEGYEQMSALFLKTADNEKEHAKMWFKELAGIGDTKENLAAAAEGENYEWTDMYDGFAKTAEEEGFPELAAKFRAVGEIEKHHEERYRALLKNIETAQVFEKSEVKVWECRNCGHVVVGTKAPEVCPVCNHPQSYFEVREENYMEVKYYVCNHCGNIIEKVKDKGVPVICCGEPMQELKAGVTDAAVEKHVPVYTIEGSHVHVVVGETKHPMLEEHFIEWITLNTNQGIYRKQLNPGQEPVADFCLCDGEQVEEVYAYCNLHGLWKCMKYVCDVCGWEYDEEEGYPEGGIAPGTKWEDVPEDFECPLCNVGKDQFSEVEMRLKDKVAIITGGSRGIGFATADKFLKEGASVVLAASSQESADVAVDKLKEKYPNAIVAGISPNLASMESVRKAFKEATEKYGCVDILVNNAGISENTSFMDYTEETFDKVMDLNVKGVFNTTRVAAECMVARGKGVILSTSSMVSISGQPSGVAYPVSKFVFFVKHFSLKKASEFPVFSEGFSLLMAANILRKAFPDIWDKVSYFRFLAMPETIRFHHLYKRTRRCCMLSAMVKLFLALSVTKKIEHLKNELKIAKRRMPVLGKIFSRRNKKKMKNKIVTSENIEKYIEGLKPQLLIAYSSDDVNNILDIIRNEIEDFVSDNPSATMNDIEIYIKSNISDFMQAGAQNIESSIFKEKLIRNHLEKRKNKLIIGIVATLVLILAVYCIYDLYIIKKYSPAYVTEEITVLDETVYPNTTEFSSESSSESAEMYYNCNIAMMKGVDVMSYAKGISRKDKKKYLKDVQKNLRLLYSQENVNDIVKIMNSSIDDFIQNNPLSTLNDFKTYVNTEDIFSDWIQNAECDEIITKIDINSTRKKRIIVILTGIVVTFILLLMTFLIGHLIMYITAQNVVTIVINMKKLMALLLSLVTVLSMTWVAFAGEMPVPSNTYPAEYEYFDDGSYIVTTITEEPAVSFARATSTKTASKTATYKSSSGASLWSVTVTGTFSYNGSSAKCTAVTGRASSNSSYWKVSSLSCSKLNTLASATATSKQYDTSWAITRSVSRTVTLSCSASGKLSMKKCKNQLLAVLIASTMAMSMTACSGTPAETVKPTETAATEKATESGSETETAEAKEYDLDDIKDYVEGVDDYKIYIKDADKLEQKDLFEQMKKLVLEKAKGNGHVVKSVDVDFKESSDKDEKAKDIYEMTYIITADAAELAEHAGEEYAGDGSDVVVKVVFKAQLVSEEEAAKLVKADKEVLGYEAEEKTGSSNVKKDNAVASNKTDSGSSTGISNKNNSGSKNNSSIKGSSSSNKNNSSNSGTSGKENAGSNKNNGSDKDNKGNSSKDNNKKDDNKNNSGSNGQNNNQKPEKHTHKYVETITKQATCTEDGEKLHKCACGKSYTTIIIATGHKYDNGTVVKEATCTEKGQKAYKCTNCSNVKLEDIAAAGHKYGEAVVLEEATCTTPGKQEVKCEVCGDTKTSEIPAKGHSYDDGVVTKEATCAEAGVKTFTCSVCGETKTEEIPATGHNWDEWTVTTEARCETAGKETRTCKTCGKKETREIPAKGHNWGKWYVLRKATCTKDGIMLRDCKNNCNSSDAKSIPATGHDWGEWKVKTPATGDQPGVKVRKCKVCGVTEEDEISEHNYGEWTVVKKATCTEEGTKQRTCADCGDVQTRSIPATGHEYVEERVKDTTCTENGLWKFTCTKCGDTYTKVEPATGHYFQGWDVLEKATCTEPGLKERVCCNWNTDGTHCDYKETREIPAIGHDWGNWVVTKEATCKEAGEKTRTCSVCDKTETQSIPKIDHEYKEQTEQKKVVDKKAWDEEVKTTIYFCTGCGAEFKTSGELGKHIDDASAGKIDGHPGYGSMSDRVETKIVHHNEEFHYETVTKHVCKVCGHVKEDMHTVSDKTEDAILVVSFGTSYNDSREKTIGAIETAIADAFPKWTVRRAFTSRMIIRKLRERDGYRVDTVEEALTHAREDGIRRLVLQPTHLMDGNEYMRVAETAAAWRSQFDQLVLGAPLLGNENDDRAVMQIITADTQAYDDGETAICFMGHGSDAAANAIYSDFQQRLHRAAYRNYYIGTVEADPTLEQLLALVRTGGNYKRVLLQPLMVVAGDHAHHDMAGEDDESWKRTFEKAGYEVTCIVKGLGELEGIRNIYVSHVRNCIKQMLMTKVDVVRAEMVKAMKAGDKERKNALSMLLSALKNATIDKRSDLTEEEADVIVRKEIKQTQETLDTTPAERTEIIEECKFRIAVYEEFVPKMMEADAIEAVIKETLAELGIDAPTVKDKGKIMKVLMPKVKGKADGKLVNQLLSGMFVMRIGMGYDVHRLVPDRDLIIGGVKIPYEKGLLGHSDADVMLHAVMDALLGAAALGDIGKHFPDTDPAYKGISSVKLLEHVGKLIEEKGYIIGNIDATIIAQKPKMAPHIPQMRQNIAKALKISEDQINVKATTEEGLGFTGEGAGISSQAICLLEEIGNFGGRDVMYETSYDPSAGGCAGCGGCKQMNFEHFIKKEMEPQDYDILLPYFKMRYSHTCENILVSNFMWKDYYHTHYIRDDHGLIWLMEVDGQPVTMVPVCTKQDLKHYFDVAEAYFNEVLHSKLTVCLADKEAVELLDLDHEKYDILTVRDYYDYVYDAEKLRTFSGKAYHKKKNHLNAFKKAYEGRYEYRSLSCGCHHDEIMAFLRKWEAQRDLEDPFHRDEYELNGIDYLLSNCGYLDYKMGGIYIDGELQAFSLGVYGKVEKMAVIHVEKANPDIRGLYPMICQQFLCHEFPDAELVNREDDMGLEGLRKSKMSYNPIYLEEKYEIRQKMKSDKSNLTVRYADGRDTDALYKLWKECFHDTDAFMAYYFDYYLRDNRILILEQENQLKSMIHLNPYTLSVCGKKVNSLYVVGVATNADFRHCGAMTRLLQRTFSDCYAGRIPLIYLMPANEAIYTPFQFAYIYSQYVEKKTHTPFSSIHNVDAAIVRDISAHPVSSEAERQRLADWSNSLLSRHYDVFTRRDAYYFERLQMENQADGGDLLLLSANGKQIGYVSYACEEIMEIREIYCEPEWQSAVGQWVLQAFRDKEGELLPLVQAPFIADAADVRGMKRPIIMGRIIDVAEWIKCMPIRNISLDIAISIIDRWIPENESTWYWQISPEGNSFERTEGPWDICLDIDTFLQWLSGYIPVDELIRQHRILLRTDWQENDAMHTLEQIPVLHGLMINEIVMKIFNTLTRRKDEFVPIEEGKVRMYVCGPTVYNYIHIGNARPMIVFDTVRRYFEYKGYDVNYVSNFTDVDDKIIKKANEEGVDASVISERFIKEAQKDMADMNVKEATHHPKATEEIDGMIDMIQTLINKGHAYAVDGTVYFKTRSFKDYGKLSKKNIDDLEAGHREIKVNGEEGKEDPLDFVLWKPKKEGEPSWPSPWGDGRPGWHIECSVMSKKYLGEQIDIHAGGEDLIFPHHENEIAQSEACNDKEFAHYWMHNGFLNINNVKMSKSLGNFFTVREIAEKYDLQVLRFFMLSAHYRSPLNFSAELMEASRNGLERILTAVDRLRTLNVQGEAFTEEENEQMKVFDALVAKYEAAMEDDFNTADAISAIFEMVKAANIHVTETSTAAFRDQILSEIVRLCDVLGIKTEKKEELLDDEIQALIDERQAARKAKNFARADEIRDELLAKGIILKDTREGVKWSRAMEQSLESFSTWFRELYHLDKPDVREYSALTLAYIGDAVYEIIIRSYIVGKGNAPVERLHKRSSRLVKAETQANLIMAIEDQLTEEEHAVYKRGRNAKSYTMAKNATMSDYRKATGCEALVGYLYLTERYERLTELIHTGLKALALIDMGYTELKIEGRNPVIEAYRSGKTIDKLFVLDGCQDGPVKTITREARKQHTIISYVSKERLDQLSETHHHQGVIAIAAAYDYASVDDILAKAREKGEAPFIFLLDGIEDPHNLGAIIRTANLAGAHGVIIPKHRAVGLTATVARTSAGALNFTPVAKVTNLGAAMDELKKEGLWFVCADMKGEVMYRQNLTGPIGLVIGNEGEGVSRLVREKCDFTASIPMKGDIDSLNASVAAGVLAYEIVRQRMGKMATPKKLPSGNWRVRVYDYTDESNVRHYRSFTAATKKECSYMAAEFSQNKSRIAAGDLTVSEAIDEYIRVKSEVLSRSTIRGYQTQRKNYYKSIETIRIRTLTTPVVQEWINRLAGRLSPKTVSNVNGLLMAALAMFAPELRISVTLPRKIPAQLYTPSDSDIKALLAAIDDDELYLAVLLAAFGPLRRGELCALESSDVHDNYITVNKCMVKDSDGIWHVQPRPKTDASFRTVDFPEFVIEHIPQKEGRIFDCNPDNITNRFHRTIQRNNLSPFRFHDLRHYAASIMHAIGVPDQYIMQRGGWATDGIMKSVYRDAIDEQTVKMNRLINKHFSSLMDIQKYIDSYVEWLKSEISFTKVGEYYEINTPFLNNDNDYLQFYVKQDGNELYFTDDGFTINSLEMTGFSLTPNRKKQLQQILIQYGVQLKGKELTIKAPANQFAQKKHAFIQCLLRVSDMYMTSRAKVGSYFLDDIQSFFQQNDIFCMENVQFTGKSGFYHNYDFAIQRSKEKPERLCLAINNPSKAAMGNALFAWEDTKPSRRQDSKLIVILNDANGISKGIEDGFESYDVDSIRWSQRSEKIELLTAMNESKKLTQEEAEHLLNMAKKSLVEGITFPEKGHDIEFDVVGSEKKDLFATKIYRGKINPVKYEIGARIKKDGILLLELHVNPSTIHVNPDGKKIVGSHWHVYSEEYGRRQAFPADDIHSEHFVENTILFMEKFNIIEKPSINYQLELVMRRDIKKLVQYYIDKFDTRNPFELAEYLNVEVMTGPLGGRAGCYMFLKNHKCIFLNEYLEEHERTLVMAHELAHSILHRKQNCYFIRDKTLLLTSKMEIEANTFAAELLIPDDLIYENPGLNKAQIARIAGYDKKIMEFKQIYNKLMNSVDRVKKICKDRKIPISRLERELGFSNGYISQLRKGVFPADRLVLIAEYLQVSADFLMTGADEDGLTEKDNRDIAKDMESIRAKLLNGADGPLSYDGEPIPEEDAELLLGQIELMMRRLKPINKEKYNPNKNKKMLYEKVATLCQNNNLTIAKLERECKMGNGTIRGWKNSSPSIENLKKVADYFNTTVNELISEGMKDLLKINYDAEQPTISARELYKSLEISKRFSAWFESNSQGFIENEDFTSVLVGTEVQNNGGVQVRELQDMLGNVRVRDEIQHLKQNRYQRELLSESDIFQKYIDIAFADITDFLDFGTEEVPVMALYGPVKVKDPETGEEKTLTKIVNTVRFKASSEVDGSILSEVKQGKDGASIKLADRMKALAWLTAHMDIATAEQQAKINQINAQTELLKAKAQLDDDEEAADDGFLEALKGTAADDWSEEAVQDETDMKRIKQFFHFQPFSRKQRKVLNWWTETSPVKDYDGIIADGAIRSGKTVSMSLSFVLWAMTTFNGQNFAMCGKTIGSFRRNVLFWLKLMLKSRGYRVADHRADNLVVVSRGSVENNFYIFGGKDERSQDLIQGITLAGVFFDEVALMPESFVNQATGRCSVDDSKYWFNCNPDGPYHWFKVNWIDKSTGYLGKIKTEQIKAKAKAEGRDHGLKKILYLHFTMDDNLSLSEAIKARYRSMYTGVFYQRYIKGLWAMAEGIIYDMFMKEKHVRNIQAIRPKLIDGNRYVSCDYGTQNATVFLLWNKGVDGVWYCIREYYYSGRDHGKQKTDSEYADDLEQWLDGTKIKAIIVDPAAASFIAELRKRGYRVLKAKNDVEDGIRLVSTMLNLLRIVFADSCENTIMEFGSYIWDAKAAEYGEDRPVKQHDHAMDAVRYFVFTILGNKPHLNRVKGGVMIRVPAGTKMTPELLGKLITKHKTEVTNRYQKLKDAYENHYEIYGLRPKPSWKPDNRISANFAKYIVDTMNGFFIGIPVKVSHEKEEVDNYLEFLDSYNDQDDNNAELSKMCSIYGSAYEMYYVDAVGNIGITYLSPVESFMVYDDSVLKNPLFFIRYYTDSENIERGSYSNERIVRHFCLKAGYQWTDEEKIHGFDGVPAVEYIENNERMGIFESALPMINAYNKAISEKANDVDYFADAYLKVLGTYLDDDDIKHIRDDRIINFDGDTDKVIVEFLQKPNGDTTQENLINRLEKLIFNISMVANISDENFGTSSGIALKYKLQSMNNLAMTKERKFRSGMNKRYSLIFGNPVSQTQGIKADDWIGIKMRFTRNFPANVTEEVENAKNLSGIVSQETQLSVLSIVDNVSEEVEKLDEEQAKLQQDAVTNMMFDKGANTHEEQMKSSEYWKKREADALKNYQKDEEAYYEEIQEIYADMMERIQKEIDSFYIKYAVKEDISMAEAKKRVSRLDIKAYARKAKKYVRNRDFSDEANEEMRLYNATMKINRLEMLKANIGLELVSGYDELQKYFEQTLTDRTLDEFKRQAGILGETITDNAEMVHSIVDASFHNATFSDRIWMHQDVLKNQLSSLVQTGLIQGRNPRQLAVELRKYFNVGIGNSERLMRTELARVQTAAQKRSFEKNGFEEYEFIANGTACEKCAGLDGQHFKVTKMMPGTNAPPMHPNCRCSTAAYQDSAEYEAWLDFLDKGGGTEEWQKENSIAKGSRDAIMKSKDAIFYEGIPKNWKKLDNLDTSLKNVNPSYSQWNIAYRRNCANCAVAYEMRKRGYDVVAKPVGKNHYLQRYPEAAWSEPDIIETSGTGLKDIENTMLTWPEGARAEITIIWKDSLEGHVFIAEKEKKKIIFLDVQSGHIYDETIFEDAEENKTRFWRIDNIETSDRGITACEAGDFMKFLKACESAMKYFKQQYGDIGLASVMDIGENWLFSGKNENQNILYGKESVIVNKTTGELQPFFLSEYPNYKVLKNAVKIEVPEQYKMEIYDSHERALWEKVKPYLDGCHLRADAPMEIIEADKELHEIAWDLDRMQMAGTTVRSYLDVVISRPDMTPEEREEELQRLKEECDKLTDWPPIYMAQNDYFVIVYRVLKYLYDCLKAGNQPEIAYLTASTYNIPDSYWTYIVISLISEGYIKGIAMTPTKNGVVFGDLQDAVITPKGIEYLFENSLLEKAKKTLKDAKEMIPFIMIITGMAHFQSVCKKKMVEWYNKNGYADTPKTPPIDLSNVFVVWSCKTLQNYKCLVSTTVSGDGIYAEYTYNGDKQELYEDVYGKITNTCHTEEMEDYVEVDEKKCDEVHNCMCTKEVGEKTYCRGCGNIQPKQEVMKKLFISQPMRGKSDEEILAERQKAIEAAEKVIGEPVEVIDSFFEKAPVNAKPLWFLGKSLELLADADVAYFAPGWEDARGCKIENICAIEYGIPVIEDYTAEMIDITVRKDRLTVSGHAGYAASGEDIICAAVTALSGTLVKSIEDLTDDKIEYDVQPGWVDIKYRDLSEKAKALVDSFFIGICLVADEFPGYIRILMKKMKWNQFLLAGLQLFAEDGGDNGGVGADGAGADGGAGNSSGAGGDGKKDSESKGKEGDGKEAKYTDDDLDRILNRKFAEWQKKKDREVDEARRLASMTEEEKTKQKQADMERQLNELLSEKNRSEMMATARSILSERNIHADDALISMIVSEDAESTKKSIDTFANLFQKAVNKAVKDALKGEPPKTGTGSGKGGYTKEDILKVANRAERQRLIAANMDLFKMEKKFRLSGLQLFAADENTTKTTDLEPAISVDFTSRLQSNITELQNLLGITDLDPVTSGSNIKIYKMEQVNTPQQVGEGETIGLTKIQQKLARTIEMTLKKFRKQTTAEAIQRSGRNLAINKTDEKLVSSIQKSIKKDFYTILLTGTGTASGTGLQATLSAAWGAVAKFYEDEDATPIYFVSSDDVAEYLATAQVTMQTAFGISYIQDFLGLGTVVIAPSLTKGKLVATAKENLRGAYVPAQSSDLAQSFGLTADSTGLIGMTHAVSSDNATIDTLMFSSVVFYPELLDGVIVATINAAEAASADTTGKKMMTALEDVKLLLDISPDEEDAVLDRKLSLIIENARRQVLSYLSSETKEVPEELSYIVTEMAVARFNRIGNEGMSSYTQEGESITYGSDISPYLTAIQSWNEKHGTKGRVRFRMRYNTPLFFVCAGKKEYDPDAGEWKAEAESRVKRWANVTHMSAERQQAVFGDIRSDRYVIRLRRPFKGAFDAVEIDGVRYLADTERYPSDRQSLVVIKNGMADLKVTGLVELARALKKNVKMDDVKTIVQKNGADLQRTMQRKADFKKGYQTGTTKRSIRLNIKGGGFTAEVEPTTEYSPYLEYGTRYMKKQPFVKPALTEIEPKFNSDMRKLVKMKTAEQAIHDCLWKYLAAKLPVYESRPMRDVGYPFGDFEDFSTGYLATKGRALPQITVNLNIWDKHEKRSNVSAVCSRLMDYARGLEEAYGYEVSLRISDSTFTINEDRTVTPSIWRGMISLVFDILMGAIKGNKIVYLYRLLADAKTMAAMALAFQTENGRTKSRDSDTVVTKDGPIRVPGDIETEISATALFADENDEMIAKLEQAIDTGERVEIWEVNLAKKGTSDSASKYKGKYFQGYVTSLELSSNAEDHAEVSIDFAIEGEGKDGYVTVTAEQEKVASYVFKDTTQEAEMMELQIKGQVYQFKFGFGFMREIDKQQTVKAPNGTQQNIGFQTAVGGILDGDAQALEDVLLLANKGQEPRLTADVLEEYIEDEETDVDALFDGVIDFLKKSNVSKKKTLNLLKQAEAMGLISQMKSLDEVDRMTIREYRLLMKANNLKNIDRDYRVHQLAWLTNAARATKSAGKGKRRPVYAKFSQFFDYRNAVRQALGKKKRSRFDGIGHLLKGGRMGDYSVKAVLSAVDRGFTSTLNNAGRSIDTLSGKISSGLGFGILTGIGQKAFDTIAGGAKSLVSSVVSTGMAFESSMSNVQALSGATGADFEALSAKAQEMGAKTKFSASEAADAMGYMAMAGWNAKDMLNGIEGVMNLAAASGEDLASVSDIVTDAMTAFGLAADGTTKGVANATYFADTLAATAASANTNVGLMGETFKYVGTMAGSLGYSIEDVSLAIGLMANRGLKGSMAGTSLNSVMTRLATNTSGAREAIEKLGVKFYDSSGNARALGDVMTELRDATKGMNNEQKTALANTVAGMEAQKGLLAILNATDDEYNSLADSIKNSTGAAQKQADVKMDNLYGDVTRLKSAWDGLSIKIYTAVNALGKSKDGLGSMRSVVQSVTDIVNKTADAVENLSNVYASSGLSGVVAEVNKMLSGTSDGVKNVGAAIAGIGAVVGANAFFSSGTWFAVSKGIDVVNGGFGGLVSSVASSAKGFKKSASSFLPFEVNIRKSIASMRSDFRQSSKWISSLGEATSQSLQAVSSRFATTGGNVKSALDGISGHVRSFGDNLARNMWDKVNNITTPLKQMSQKASTILKPFSMVGSVVGKALSTVAGAAVNLGAKTASGLTKIMGLALKALMPAALVAAALAGIGLLYSQFGTQIDQMLSMAQAKGPQIITNLVNGISSRLPDLIQQGGKLVSDLLDTITANLPAVLNGGVTLVQSLVSGLISALPSLATSATNMISTLLVGIASALPSLIVSGMQLLLALAQGIANNLPTLINSAVTAISTFAQGFIQNLPTILTLAAQIIGTLAQGLISAIPQLISAIPQVVSSMIDTIMSTDWLAVGSQIVSAIGEGIFGGLAGIGGKIGNFFGSISDWFAGGEKGGESVTSGSVSSINAGIPQVSSAATSMGTAATSSVASGMQSSTGTVTSAAQSVVTSATNTFSAASGTAMTAGSSIGQSLSSGLQGSVGSINNVASTAMNGFNASLNTGGATAVSNAGKIARNIVTAFKPAITGARTSGQTIGQNFATAISSKSGAVSSASGRLVSAVRSALSNVSTYQYGAYIGQGLANGIWSQLGNVRAAANALVAQAERAIRAKAMIHSPSKLTYQLGEYFGEGFTNGIKNLTKDAWKAASDLVSIPAVNVPQMALAGWDTTLNDEYFYNDSAEYVIYVPVEIDGKEVATVTAPYTEAELTKRQKYRNRKQGIRMYDFIDVNEYQSGSTLPSEALMINGEYIEDQIQGYRTLYVKGREMLNKAVTTQTVESRDGADFRYSRYPERTITVGYVLEAADNAAFRAAFNQLNAILSVDQSLLVFADESDKFFRGTLSGIEDVTPGRNTVRGEFSFICSDPFKYSLQEYEASPNEDDGTTFVIDYKGTYKSFPTLEATIDAGDCGYIAFLNDNAHIIQLGDPEETEGESFPASQTLFNQSFTSWNASAASGWGQNSGDVVGSSAWVQVGSMKTMAAGAINILTAGNYGSGSQWHGPTITRVLPADASGVVGSANFRMQWKQLMSIGTSKTAGNERGIFQMMLINTDSNPHKIVAGVSIMKSTGGTKATKRIYVGNSVYATNIDLSYHNGSFGWTIVNKNGQNFVPVRTCSIEKKGSTITFNIAGTKQSYTDPSWENLKVHQVTIAFGQYGSQPTLFTNGLYYAKFIADNCTTWQDIPNKFSAGDTVTADCSSADICLNGLPSPELGALGNEYEDFYLSPGPNQIHCVWSDWAKNKPTFKLRYREVYLMILYFADRKMNILGYATTQLKSTYLIVDDKKTEEVESGISSFECEVSWASKDRLKLETMMDAGNYILRSNENEKDFFTIIETNIDTSKQTISVYAEDAGMDLLNEVAMPFTSDKAYDIAHYIGLYAIDTGFEIGINEIPNLTRKLSWDGETTCTERIASIATQFDNAEISYSFETKGLLITHKYINIFKKRGKDTGEQLRLGYEIASIATNKSVANLATSLYVTGGIPEGKEEPITLKGYKYDDGDFYVWGSRLNSRKALAIWSRYVWDREPNKLNGYTGHIVQAYSYDTTSQQELCAHAITKLKKLCQMEVNYEADIIYLPENVKIGDRVNVVDNEGRLYASTRVLRLETSVTGRKRTATLGEYLIKDSGISEKVRDLARQFAESTASVSRANIKAEAAKAAADAAKAKAEEAEDVSNAAKETAEGAKSTADSALASANEAQNTANAARDAAGEVTEKVTGIVKDVNDAKTAADNAWKAASTAKEDAATAKTSAANAEKNAADAKTAADAAGTKSDEAVSTATAAQSDAAEAKTNATKASETAAAAKADAAQAQKEIDSLGKNLTTLSNTMRADYARKTDLTEAEASLKTKISQNAANIEATAKKVSVIDETANNAADLAATAQTKAEAAQTKADQATSEAAAAQTKADEASQAAQTAQSNADTAKAAAENAQSVADKAKTDLAEAQKNLDTVKGRVDATEGDIAKAQKAVTTAQAAAEKAQSDANAAATKASNAQDVADAAKANASLAQTAANQASAKAEAAQTIANEAKVNASDAQKKAADAVKTASDAKTAANNAAQTASDAQDVANAAKANATAAQTAADDAKKKSDQAAADLVSAKKNLEEVSGKVDSTAEEVEAAKAAVATAQVAADKAKSDAATAQSTADTAKANASNAQKAADTAKTAADNAQKAADDAQKAADKAQDDVNALTKRVVNAETSIKQNSEAIELRATKKEVTEAANATLKSAKTYADAQIKVTADSINQNVTKKFDNLQIGGRNYAVGTSNEWSEYWIPSTGVNICRNVTKIVVPDTFKKGDVFTTSIEIEWSGFKSSEGTFRLRSQGSSDGTWDKLNPFAEKLADIRTESGSQLFKVTNTWDGKATNYIVGFRCDYSSGTGKIRWRRLKAEAGNKGTDWSPAPEDLATADNVNDKLTEVRKEINSNIEQTGEAIKSSVYEKVYLKDDVDTLLSSVNTEVEQAKTSWQVTFNQLVKQLNDYSDGSDAAFDEIRKYIRFEDGNILLGNSSSPLILRIRNDRIQFLQNGYEVAYISDQRMYNTTCEIINQLRIADSAWTVETNSNGDTIVSLIGLMASTASSHVPCGYNGHYHLYMTITQNKRNASTNQSNVTVKMYAQSDSSSYGAYNLDASGNTVKMTVNGKQVVNKSMAMDFRNKATVQLASWTGAISHGSDGSKKLDCSGSFSISGSSYLSGGSISCSIQLESIPRATKPTLSASSVALGSAVTINISPAVSAWTHNIYYRIGTGDWVRFATGVKSNYSWTVPLGIASSYPTATKGTITIGLNTYNGSTQIGGTQTVNLNITIPASVAPSVSAVTVSEAASGLSNFGFVQTKSKLKIVASASGAYSSSIRSYVYNIGSQSYSGLENTYTMGEVVRDSGTVVVTVTVTDSRGRTASKTVSITVLAYSPPQITHFECSRCGDANGSANANGQYLKVTFGYSVSPLNNKNKASYLLKYSVYDDGKWGGLISGTQYTYSGTYISATAILNTASTYQIGLVVTDSFGTASFYKEIGTAVRLLSYIVKRFALAIGKIPEIDNMLDVALETIFRKKVTMNSDLQVNGNSGFSEGASFYGDAACNGTFYANGNLNANRDIGVGGNMWFNQNNGILFVTRNDGVQLEAINTCDGENNLSFGWTNYNEQRGDTYVGGKDVYFRVSGGASKVGYRPYYRRGDSIDVRMGTAGYVTSGTKEFYFAIPLGKPVVGNPTVSVSSINGLMMRQNSKYIIKADWVQPDRYSAYVRDNNAIGVIAFWNSATNAANNSPVGIDANIRITFSMALYKEIVQDDGVVTCYHRILYHQTTPNRQTSIAVLSYVNEKAREAEKDNTMAQPYMKAVTYETDYDSAMTDRKAYAYLKTLHIFEGAKDIVDEADTDISGDDFLAMVEEVMMTLEEAKAIIDALVTLRNSATDEQALKASALYPKWKVGTAYQKDERVLYDDILYKVLTDHTSQDDWTPDEAPSLFAKVLIPDKNVIPEWEQPESTNPYGKGDKVTHNGKTWRSTIDGNVWEPGVYGWEEITEMRIEFLQIFAEAMASNVIFEALMIAVVLDTILGVLRAIKFRKFNSSAGIDGAIRKVAMLVSAAALMGADLLVHVNLAAMIPDTYLQAVGLTKVGLCELFCLLFVIYECISILKNMLLCGLPVPAKLRSWLEEFLENMTAELPEETNKETVEETKKRVDMSVTFDQTKEGYVNGTSMPLAGCGPCSVASIACNIAYTTPKQVAAWLANRGAFGTSGTTRAGITVALDHYGFKSTYYTPESGGGTSWKKAMDQMKSLKGDWWAIFLVVGTKNGGKDNLWTSGGHYLAITDLKNGKLYVRDSGSKKRTGYYDPELLRYDTNVIWVIQKKSNVATYSGAFPTLPAKGYLGLKDTGTQVKHLQMFLKWYGVYKDSIDGSFGANTEKAVVAFQAEEKLKQDERFGPACLTRAKTVKKMTLTQLHYVITIAETKSFNKAAEKLYVSQPSLTSAIKELEKELGISIFYRNGRGAVLTNDGTEFLLYAKQIYGQYENVLEKYGKGGSYKKKFGVSTQHYSFAVKAFVDMAREFDMSKYEFAIRETRTGEVISDVNTMKSEIGVLYLCDFNRKTMTKLLKNANLEFHHLIDCQAYVYLWKNHPLAKEASIRFEQLEKYPCLSFEQGDNSSFYLAEEILSTNEYPQVIKANDRATMLNLMIGLNGYTLCSGIICEELNGSDCIAVPFHADEQNPNSLMEIGYVTRKNTILSQMGERYIYYIKQYLKIEMADIKDSKNWGFETKQVHIGQEQADPVTDARAVPIYASTSYVFHNSQHAADRFGLRDAGNIYGRLTNPTEDVFEQRIAALEGGVAALAVASGAAAIDYTIQALAKNGEHIVASKTIYGGTYNLLAHTLPLTNNITTTFVDPEVEGSFEAAIQENTKAIYIETLGNPNSNLVDIEELSKIAHKHHIPLVVDSTFATPYLIRPIEYGADIVVHSATKFIGGHGTAIGGVIVDSGNFDWKASGKYPWISDPNPSYHGVAFTDAAGPAAFVTYIRAVILRDTGATLSPFHAFIFLQGLETLSLRVERHVSNALKIVDYLSKHPQVEAVHHPSLPTEPSHELYKKYLPNGGGSIFTFEIKGDAKTAQDFIDHLSIFSLLANVADVKSLVIHPATTTHSQCTEEELLDQGIKPNTIRLSIGIEKVEDLIAALDAAFEAIKMEKATDNLNEKPAVTKNFIELAIDKDLAEGKYTEICTRFPPEPNGYLHIGHAKSILLNYGLAKKYNGKFHLRFDDTNPTKEKTEFVQSIIADVEWLGAAYDGEVRFASNYFDQMYEAAVKLIKKGKAYVCDLTADQIREYRGTLKEPGKNSPYRDRSIEENLQLFEDMKNGKYPDGSKVLRAKIDMSSPNINMRDPILYRVARMTHHNTGDKWCIYPMYDFAHPIEDAIEGISHSICTLEFEDHRPLYDWVVRELEYPMPPRQIEFAKLYLTNVVTGKRYIKKLVDQGIVDGWDDPRLVTIAALRRRGYTPESIKMFMEMVGVSKSNSSVDYAMLDYCIREDLKMKRPRMMAVLHPLKLVIDNYPEGQIEYLDVPNNQENEALGTRKVPFGRELYIEQDDFMEIPPKKYFRLYPGNEVRLMSAYFVTCTDVVKDEAGNVVEVHCTYDPATKSGSGFTGRKVKGTIHWVAKETAVKAEVRLYENLVDESKGSVYNEDGSVNINPNSLTVLKDCCLEPNFESAVGGDSYQFVRNGFFCIDSKDSKPDALVFNRIVSLKSSFKLNKMKLVPLGDRVVLKQCEAEEKTKSGIILAGQAKEKPQEAEVIAVGPGGVVDGKEVTMQVAVGQKVIYSKYAGTEVKLDGEEYIIVRQNDILAVVEMAKEIKYGAEARKALEAGVNQLADTVRVTLGPKGRNVVLDKSFGAPLITNDGVTIAKDIELEDPFENMGAQIVKEVATKTNDVAGDGTTTATVLAQAMINEGMKNLAAGANPIILRKGMQKATEVAVDAIKEMSSTLTGKAQIARVAAISAGDDSVGEMVADAMEKVTNNGVITIEESKTMHTELDLVEGMQFDRGFLSAYMCTDMDKMVAELDNPYILITDKKISNIQEILPVLEQIVQNGAKLLIIAEDVEGEALTTLVLNSLRGTFKVVAVKAPGYGDRRKEMLQDIAILTGGTVISSEIGYELKDTTFDMLGRAKSVKVTKENTIIVDGAGAPEAIKARVDQISAQEKETTSDFDREKLQERLAKLSGGVGVVRVGAATETEMKEKKLRMEDALAATKAAVEEGIICGGGSAYIHASKKVAEYAATLEGDEKTGAGVVLKALEAPLFHISANAGLEGAVIINKVRESEVGVGFDALNERYVNMVEAGIIDPAKVTRSALQNATSVASTLLTTESVVAEIKKDVPAPMPQGGGMGMMMYNGANGDTFCEVLVSRRRGTPETVKAALAIIVGLLFSAVIILLVPMFFILLIPVWALVIFVVRMQKLEYEYIFTSGDLDIDVLIGNYKRKTRMSLSMENITLVAPENSYELDGYRRNPNSHRYDFSANNVMQTNYIIIGNWNNQQIYVKFTPNEQILDAMFRTSPNKVRRRMSKIIGEGITFDDVLLVPAYSEVIPNQVDISTWLTNTIRLNVPLMSAGMDTVTEHRMAIAMARQGGIGIIHKNMSIEAQAEEVDKVKRSENGVITDPFYLSPEHTLADADRLMAKFRISGVPITEGKKLVGILTNRDLKFETDYSKKIKECMTSEGLVTAKEGVTLEEAKKILGQARKEKLPIVDDNFNLKGLITIKDIEKQIKYPLSAKDAQGRLLCGAGVGVTADILDRVDALVKAHVDVIVIDTAHGHSANVLRTVHMVKDAYPDLQVIAGNVATAEATEALIEAGVDCVKVGIGPGSICTTRVVAGIGVPQISAVMDCYEAAKKHNIPIIADGGIKYSGDVTKAIAAGANVCMMGSMFAGCDESPGSFELYQGRKYKVYRGMGSIAAMENGSKDRYFQSDAKKLVPEGVEGRVAYKGFVEDTVFQLLGGLRAGMGYCGARTIEELKENGRFVKISAAALKESHPHDIHITKEAPNYSVDAMTDKFTHIPAAYEIVSLEYIDEIKSQAALLRHRKTGARIAVLANDDENKTFNIGFRTPPKDSTGVAHIMEHSVLCGSEKFPAKDPFVELAKGSLNTFLNAMTYPDKTVYPIASCNDADFQNLMHVYLDAVFHPNIYIHDEIFRQEGWHYELTDKDAPLIYNGVVYNEMKGAFSAPEQILYRKITDTLFPDTIYSVESGGDPDVIPQLTYAQFLDFHRKYYHPSNSYIYLYGNMDVAEKLAFIDEAYLCQFDNTRVDSAIAKQAPFAHTSVTRGEYPIGNDDREDNAAYMAYSWVVGDSLDAKLCLGFQILEYALMEAPGAPLKQALLDKGFGEDIYGMFETSLIQPYLSIIIKNINEEDRDEIVQVIQTELEKLADGGLNHKTLEGALNYYEFKSREGDFGRWPKGLMYGLQLMDSWLYDDNKPFVHLKFQAVYDELREGLSKGYFEDLIRHYMIDNTHCSVYLLCPSKGLAARKEQALADQLAEYKASLSEEELEQLIAATEELKQYQSEPSPKEILEMIPLLTIDDIRKEAEPIYNKVLSEEGIAILQHEIETNRIAYVDLLFDISHIDAEEVPYLGILTEVLGNMNTDHYTYQELTDEVNLYTGGLRTAVNIYGLQGSDTYKPRFEMSGKVLYSKVPKMFELFEDILLHTHFDDEKRLKEILNQLKSRLEMGFMSNGHSTAVNRAMSYFNQGSWYKELVEGIAFYQFLCAILKDYDTRKTEIIHKLQTIGQKIFRKAYLMADMTVDHEGMQICTKPLVSFAGKLYTAPMSAVDCAVKTIGTCPRHNEAFITSGMVQYNACAGNFGGSGMAYSGSMNVLKNVLGNEYLWNNVRVKGGAYGCMCGFAPSGNGYFTSYRDPNLAKTYDIYANTADYVRSLALDDRELTKYIIGAVGAIDLPMTASMKGNRSLAAFLGERSFEQIQKNRDELLATTVDDLRGLSKAVASVIEAGHICVVGSESKITEEKDRFEYVAQLTQMNQQYKSGFATLIGRPNVGKSTLMNHLIGQKIAITSNKPQTTRNRIQTVYTSEEGQIVFVDTPGIHKAKNKLGEYMVTVAERTLSEVDVILWLVEPTTFIGAGEQHIAEQLRKTKTPIILVINKIDTVKREEILKSIDAYKDICDFAEIVPCSALKGDNTEDLIKVIMKYLPYGPQFYDEDTVTDQPERQIVAELIREKALRSLNEEVPHGIAVSIDQMKARNSRLIDIDATIICERDSHKGIIIGKQGTMLKKIGSQARPEIEDMLGKKVNLKLWVKVKKDWRDSDFLIKNFGYDKKEYMAELVKVTGMVISTMAVGEYDKRVVILTKERGKIHGFARGAKRPGNSLMAAAQPFVFGEFMLLEGRSAYTISSVKVMNYFEEFRKDMDATCYGCYFLEFADYYGRENADDLEMLKLLYQTVRALCKKTIAYPLIRCIYELKIMAVNGECPQCFECACCHTTENLSVFSARYRGLLCEKCAGHEKMTTISISPAAIYTMQYIISTPIETIYTFTVSDDVLNNLKSIIERYRNQYIDRRFKSLEILTMMEDVMKHCILPAVLLCMTLLAGCTGRKVDLSNVTESTIGVNGDGSVEEVVIESFDKEYYSLSDLTAYVNKQVDAFNQANPQEQPKDKKSDDEEITAVSVHYVETDPDAKTAAMALGYLNMDIYDAFNETDFEFLSMEEAASDERIADIDGLVEVKSGEETTFKDLSEHKHLHLIYTDSSVRIQTSGKIMYYSKNVSLVDDHTVQTSDDPSVILFKMEKTMEKIVALAKARGFVYPGSEIYGGLANTWDYGNLGVELKNNVKKAWWKKFIQENPYNVGVDCAILMNPQTWVASGHLGGFSDPLMDCKECHERFRADKLIEDFCQDNGIELEGSVDGWSNEQMVNFIDEKNICCPTCGKHNFTDIRQFNLMFKTFQGVTEDAKNTVYLRPETAQGIFVNFKNVQRTSRKKIPFGIGQIGKSFRNEITPGNFTFRTREFEQMELEFFCEPDTDLEWFAYWKEFCINWLQTLGIKPDEMRVRDHEAEELSFYSKATSDIEFLFPFGWGELWGIADRTNYDLSRHMEVSGEDLTYFDEGKKEKYIPFVIEPSLGADRVVLAFLCGAYDEENIGTEEKPDMRTVLHFHPALAPVKIGVLPLSKKLGEKAEAVYAELSKNWNCEYDDRGNIGKRYRRQDEIGTPFCVTYDFDSEEDGCVTVRDRDTMEQERVKIEDLTAYFMEKLAYMRKWVYMFTEGNASMRELLGGKGANLAEMTNLGLPVPQGFTITTEACTQYYEDGRYINQEILDQIMEAIAKMEEITGKKFGDKENPLLVSVRSGARASMPGMMDTILNLGLNEEVVHVLAKKSGNPRWAWDCYRRFIQMYSDVVMEVGKKYFEELIDKMKAEKGIKLDIDLTADDLHALADQFKAEYKEKVGKDFPDDPTDQLIYAIKAVFRSWDNPRANVYRMDNDIPYSWGTAVNVQMMAFGNMGETSGTGVAFTRDPATGENRLMGEFLLNAQGEDVVAGVRTPQKISHLQEIMPDVYDQFVGICHKLEDHYRNMQDMEFTIENGHLYMLQTRDGKRTAQAALKIACDLVDEGMISEKRAVAMIDPRNLDTLLHPQFDQAALKNAVPIGKALGASPGAACGKIVFSADDAKEWADRGEKVVLVRLETSPEDIEGMKAAQGILTVRGGMTSHAAVVARGMGKCCVSGCGDIVMDEENKRFTLGGKEYHEGDAISIDGSTGKIYAGIIPTVDATIAGEFERIMSWADKYRTMGVRTNADTPRDARKARELGAQGIGLCRTEHMFFGEGRIDAFREMICAETKEEREKALEKILPYQQDDFEQIYEAMEGLPVTIRFLDPPLHEFVPTEEEDIEKLAKAQGKSIDHIKGIIQGLHEFNPMMGHRGCRLSVTYPEIAVMQTRAVIRAAIKVQKAHPEWTLVPEIMIPLVGEIKELKYVKKTVVETADAEIKASGIDLKYEVGTMIEIPRAALTADEIASEADFFSFGTNDLTQMTFGFSRDDAGKFLNAYYDAKIYESDPFAKVDQKGVGKLMKMAIDLGRPVNPKLHIGVCGEHGGDPSSVEFFNKIGLDYVSCSPFRVPIARLAAAQSAIKMAEAKMNILSTQWKPNNTLEITLSNDYVIILKDVSFANYLALSSNPTLLDKMILSRTNWMDINFNIGFGKIDSLSWDSSLLKIQFSNGEVIVYENITFTEYQQLLSYLTAADKLSIEAMLNELEMYHVHHVAMDKGTIFKFYNDLDTDQIIASQYLLLPNLEEMKAHTFESQDPDFAKKVKPGDYVVAGENFGCGSSREQAPGVLKALGVKAVIAKSFARIFFRNAINIGLPAIVCKDLPDDVQTGDTMELHMSEGTVEANGKTYTCTKLPEYMQHILNQGGLIASLNKEEDRMGMTIAEKIIAAAAGVESVRPGDIHTVNLDRMMSNDGTTHLTVDMYNNQLNHPHIADPKKLVFIVDHNVPSDNPKTAASQKKMRDFARENGIDFWEGKGVCHQIMMENYVCSGELIFGADSHTCSYGAIGAFGTGVGCTDFLYGMVTGTSWVLVPETVKFNLIGKLPDGVYARDLILEIIGTVGANGCNYQVMEFTGEGAKTLSISDRIALCNMAVEAGAKTGIFEPDEKAIAYLEEHGRKPKAVYHSDPDAVYAREYTFDLSKIRPVVAKPDFVDNLCPAEEVRGIKIDEAFLGSCNNGRIEDLRVGASILKGHKVADSVRFLVVPASLEIYKQALKEGLIDIFMDAGAIVMNPNCSVCWGSCQGVIGENEVLISTGTRNFKGRAGHPSSKVYLGSAATVTASAIAGKIALAEDIQMENMTGKVWILGDDIDTDIIIPTEYLAMKTIDDMKQYAFSPLRPELAGQIQKGDIIVAGKNFGCGSSREQAPEIIKALGIQCVIAKSFARIFFRNAINNGLLLIEQPDLYDDIKEGDTITVHMNKHVDYNGKEYPIAALPENLMRIIQAGGLVGAMRKLNGLDMGETIIEKIIRHNTGKSVKPGDIVTVNVDRVMIHDIFIPFVAEKFEEMGFSKLYDPEKVILIYDHLVPASQLDDTRHFRIGDAFAAKYGMPHVHRSDGICHQLMTEAGYVKPGDVVFGTDSHTTTYGCVGAFSSGIGYTEMASILGTGTMWIKVPETIKVVIEGELPANVMSKDIILRLIGDLGADGATYKALEFFGSTVDNMSVASRMTMSNMAVEAGAKCALFTPDEKTAKYCDIELNDYQKSLKGDADAVYVRTLTYRAEDFVPVMACPSQVDKIRDVSTLEGTPIDQVFIGSCTNGRLEDLAAAAEVLKGQKVADYVKLIVTPASRKIYKQAMDLGIMETLAEAGAIITHPGCGLCCGRTGGILSDGERVVATNNRNFLGRMGTSKVEIFLASPRTAAACAVAGKIVTPKMKNRVCIFLCKCGFSLFFSSVIPEFGLYCFYIFLHPIADLLFTMGGNHIEMNKLLKTQSAPRIIAGGFALVIFIGSLLLMLPCSIQPGTHLDYIDALYTSASAVCVTGLTVVDAGDTFTALGQFFLAALIQIGGLGVTSISAGVILAMGRRVNLKGRMLIRESMNLDADRGLIGFVYTVFKATLLIELIGAALSFIVFIQDYSLFRAIGVSLFHSVASFNNAGFDILGGGQSMVPYTDNIFLNIITCVLIFFGGIGFLVIQELWQKKCQWKKLSMHTKVVLSVSLALIIIGTLLIKLTEPVSWLCALFHSVSTRTAGFASRPIGDFGAPALLVMIVLMFIGASSGSTGGGIKTSTFFVLIRGIFSAATNQSEKAFHYSIPKDAFKKAAVISILAAGVVITSTYILMILEPQVDLLDALFEMTSVFSTAGLSTGISSDLHLPAKILSIMIMFTGRLGPLTIASLWYFSRGELALYPDGNIVVGMLSLKNNSYCSRNSKNKNMTYGIVGLGRFGSALAMDLASAGAEIVVMDKNEERVRTLREMTEHAYVVANLDKKTLIETGIQNCDVAIVCIAEHLDTSILTTLNLVSLGIPRVIAKAATAEHGVILEKLGAEVVFPERDMAIRLASRLENSHNLDIVQLSEQINISKTIVANEAIGLSVRDINLRERFGLNIIAIQSDDIVINLVTPDYRFKEGDILFVSGSKEGIFKLNQWLNDMIRILIVEDEKPISNLIRLSLTKAGYHCTCVYDGNAAVDKLDREIFDLILLDIMLPGANGFELMDYIRPLGIPVIFLTAVNSVNNRVRGLKMGAEDYIIKPFEIVELLARVEVVLRRYNKMIQHLHAAGIDIDTVSMTVKRDDEEIQLTNKEYELLLLFARNPGIALYKETIYERVWGGEYVPGSRTVELHIQRMRKKVGWEKALITIPKVGYRLVDTTMKFKYKVMLYMTAFLSFFYVVSACLLIFVSFQMSLNKEKANALNAYRMIQNMLLVSNDMNQKAYTYTLSQLASQNDSMWKGIRLKQTGSGTLYYENGYLPYHLNDEDIRTMKTEECCLIRYIQTEDGQYIQVSGLVETGSVPLSLEVSQDVTQVYTARETQLQIYKVILAFVLTAGSVSALLIAEKLTKPIRQLSDVSKKITDGNLSIRADIHSGDEIELLARDFNRMTDTIEDNMHQMADAMKRQEEFMGSFAHELKTPMTSIIGYADLMRSQALDEEEQQEAAEYIFSEGRRLESLSLKLLDLLVLKKKDFELRPTNLQTVIEGAVHTALPSMADKNISLKGRYDDGFCLMESDLVKSLIINLIDNAKKAIDDSGNILVVGRLTEEGCLITVADTGRGMKPEELSRITEAFYRVDKSRSRAQGGAGLGLALCQAIAELHHGQLIFESTPGKGTVVKAVLNGGRTKCEMRIKKNYLTLLAITLAVIILCFMLPSALFQFYDTEWTEKRVEKSANVSGLNIDSMSLSEKIQLIYNLDTIEAALNGETDTLLEVAVLSRGYKLTKEEAWSNIITEFMKLADGLETLMPEFYKYIASIQDYNDAMKYTDSDAILPILVTDQNGNSTILWVMTFQMDSYFAAEQPSDSYPMPFAQLYYDESSGYLLGMEIYDLDMSQLEDFELNILQDANEETTELPLEQRIAGYFLKRYANYVGWDNSRNQMDWSYMDYYASLEISNGNEALDLKCYVLIEDCIDAEDHLMLNIKLNRESMAEKTDRRIRKTKAQLRSGLAKLLKEKTIKEITVKELVEEVDINRSTFYLHYTDIYDLLEQTENDLKNEILEIVNNDQRLRMEETMPYITELFAFIADNREIASALLGPHGDVAFMRQIEQIISSHCMKYLKPYLEQLDERTLESVNGFCIAGCIGLIISWMKHDFEDTPESMARMTYTLVLSALKPYMQSIAEMGKYQRVFLIVLDSLGIGAMPDAKRFGDTGADTLGHISDTVAHLNIPNLQKLGLANLHPLKQVPAVEHPMACCARLFEKSNGKDTMTGHWEMMGIETKKPFKTFTEHGFPPDLIAALEEKTGHKVIGNKSASGTVILDELGEEEIATGHMIVYTSADSVMQICGNEETFDLKELYRCCEIARELTLKDEWRVGRVIARPYVGKKRGEFVRTSNRHDYALKPTGLTALNALKDAGYSCISVGKIYDIFDSEGLTESNKSKSSVHGMEQTIDIAGRDFNGLCFTNLVDFDALWGHRRNPIGYGEEIERFDVKLGELLNVLRKDDLLILTADHGNDPTYIGTDHTRETVPMIAYSPSMKASGILKERDAFHNFAVLGATITENFGVNMPEGTIGESILDLLQMQNYTLRNGKEKLKTNYTKRDGYMMTAKKEFMYWRTNKEMISLEIACKNAETMMLKYGYVKGFLDIRETDTKWFFVGSLSEDGPTPFAAVPFFVKKENGECSMVLKSEINAMCECCNAPKVEIPSEFQYKIKSHMFHFGDNEGIEIVRKPEKHAVIGRQIHSLYGMHRDEFKKGIFKEKIAYEAMAKKFCAKKGPCYLLAIVKKQILFIVIFAKTSSLSTDMSGRTKEETAGITHLGSQGTKYDFNYCPEVLETFINKHPDHDYFVKFNCPEFTSLCPMTGQPDFGNVIISYVPSERMVESKSLKLYLFSFRNHGDFHEDCMNIIMEDLIKLMDPKYIEVWGKFLPRGGISIDPYCNYGKPGTKWEEIAAMRLANHDMYPERVDNRMKALVLSSGGVDSTTCLGLAVDKYGSDNVIALAITYGQRHTKEIEAAKAVAAYYHVEMLHLDLTPIFQYSDCSLLSHSDQAIPEESYAEQLQHSDGKPVSTYVPFRNGLFLSSAASIALSKGCDVIYYGAHSDDAAGNAYPDCSEVFKNAMNQAIYEGSGHQLKVEAPFVNLTKADVVKKGLELNVPYELTWSCYEGGEKPCGKCGTCIDRAKAFAANGVADPALMAIDTEAIKEHVRGILVALGDDPEREGLKETPERVAKMYEEVFEGMNYTNHEIAQMFDKTFEQDLELSGKSDDMVYVRDIEIFSYCEHHMALMYDMKVSVAYIPNGKVIGLSKIARIADMAAKRLQLQERIGSDIAEIMAEVTGSDSIAVKIEGCHSCMTARGIKKTAAKTLTTTFTGRFKTDASLQMRVMMQMERTYEVVEHFVSINGEGPLAGQLAVFVRFKGCNLSCLYCDTKWANEPDVPARVMTAEEIHQAIMETGVRNVTLTGGEPLDRPYISELLEKLAADHLLHVEIETNGSVSLAPFVNIPNRPSFTMDYKLSCSGMETAMDTDNFSLLTEKDTVKFVTGSLADCERAVEIMKQFRLIGRCHLYFSPVFGSIDPADIVEFMKEQQLNGVNLQIQMHKVIWDPDRRGVMYYLKTEHSFDSAHFLAGYEGKCRNIHGHEWRVVIEICRPDLDEEGQTRDMMFDFGQLKKDVKREVDAMDHALIIEKGSLMPATMAALQAENFRIIEIPYRPTAERLAYYFYERLTACGYHVHRSTVYETPNNCASYEEMNRQKIMANRRRDIIIIVGCTILALIGGYGWSRGFGNFTWFRNFDTPGTASVDDAVLNYEPLIQQYAKEYGIESYVPVIEALMQQESSGLGADVMQCSECYYNTEYDQTPGSIQDPEYSIKTGIHYFADCLELAGCKGPGDIRRLRLALQGYNFGHNYIEWAIKRDGGYTEANAQAFSDMMKEQLGWETYGDTTYPEHVLRYYKMSKYLVVVDMQKDFIDGSLGTKEAQAIVPKVIEKVAEFKGPVMFTRDTHEENYLETQEGQNLPVEHCIRGTEGWELQPELNEYALKNHCLIFDKPTFGSTSLAGCVSGIARMAPIDQIELVGLCTDICVISNAILLKTALPDTEIIVDASCCAGVTPQSHKNALEAMKMCQITIVGEMKKNNIHSQQDTVQTEHLSRRHFYIIIVLIVIILVALIAHTILRPDRNATLRIIYTSDMQGQITYSDGQYAGYEKVAALSHKLSSEGDHVLLLDAGNCLGDSVIAEMDNGQSILSLMNTMQYDAMVPGPMDFVYGADTLSSLRSKASFPFLAANITKADGSTVFENYKILNINSVRIGVIGVTTGLSQTQAQKSSLTVADPVETVKNVLSQMSGKTDAVIVLTYTGSEDITNALAAIDGVSIVIESGASEAFANTADNGTVITSAGTKGNIIGVASLDINRSDVSVDSQFYTSSDYSSLSAEQSVADAVASVVRSADTNASEHAGSITLSTDTAADTAETESDTSDETADTLEDGSADSDVRTYHLAETGIGNLTADAMLDAAASDGAVVALMPDQLISGTLANGIVSKGQVQNLFDDQLYLVTCKMTGGDLRTALENSFNNYPNADGFLQVSGISYTFNASTAIGSRLSDIMIDGHKLDDARTYIVATTNILADTLGYRSEATGRVGTYRTIASVVTDYIQKNSSATSGSALPSETESDTEDTTASGETADTSRIQINEMQENESNESDKPTQDEQIREYGQVVLKANAGKHRIFLLSIIGEVEGHEQSPGNVKTTKYEHVLPQLAMAEDSCDIDGILVLLNTMGGDVEAGLAIAEMIASISKPTVSLVLGGSHSIGVPLAVSADYSFIVPSGTMIIHPVRMNGMVIGVIQTYEYFERIQERILNFIVTNSRIAKSHLKKLMLDTSKLAKDVGTVLDGQETVDCGLIDAIGGISDALAKLNEMIDEFQIRSCMSLLQSILMGIIQGATEFLPVSSSGHLALFKIIFNVNTETGLLFDTMLHLGTLVAVCIVYWKDVRNLIVAAFQLLFDIIANFKTWISNKKNGEHTAYRRLINSAYKKFVVLILITTIPTGIMGVAFSSLIERASQTLLVPGICLVITAILLLISDTRPSGHKKVKKTTYANAAVIGVAQGFATFPGLSRSGTTITACLMLGFDRAYAVKYSFLASLPAILGANILELRHFDAAAVAGSSIAYYFIGMIVAGVVGYICIKLMIYIVRSNKFQYFAYYCAVVGIIAIIAYFVKGMAGKQSSEVKRRTASTRKTTTTRKSSAGKKRNTSGKSANTKASRMQVSEYTEPVGDEIKLIIILAVSILILLSVFGLGGRVGDKAAYLFFGLFGFVAYALPFLLFIGSAFHISNRGSRLARIKLTAATVFLIMIMALMALADSSFDGTASVLDGFLNSAAAHNGGGLIGFSLSWVLFNAFGRAGSTVILVCLMLVSGVLITGKRIFIRLGTLIGHMMTDMGQHFNAWREKRARERLARMEAKAAEEDSLPEDEAYENIDEETVSIQPKKKAANIIIPSRKKENVKSKDPAPASSSEPVLQTYTEESATSAETAVISDDSKQPSLDSFDQGQSVQPLHIQIPEFMTGHVSGKSSVKAPSASISDIMSNLSRDIPSEAESEPETETVEDKKPKGKPVIARTILSPDDLELEIEGLPEETPVNTDDTFIDISKILSEIPETTGNIHTEVADMQPEDVSPAAQAEQQTAVSPTAARTSSPSHHTTAKGTVDDTASGSDEPLEIVEEEIEKYEFPPLDLLDQGKGSGNQQTAASLKQTALKLQQTFESFGVGVQVTNVSCGPAVTRYELQPDQGVKVSRIVSLSDDIKLNLAVADIRIEAPIPGKAAVGIEVPNTHKEMVHLRDLLESDKCKQAKSKLAFAVGKDIGGQTVVADIEKMPHLLIAGATGSGKSVCINTIIMSILFRADPNEVKMIMIDPKVVELNVYNGLPHLLIPVVTDPKKAAGSLNWAVNTMMDRYNKFAEIGAKDLKSYNARVENLPYESEQHKKMPQIIIIIDELADLMMVAQSEVEDAICRLAQLARAAGIHLIIATQRPSVNVITGLIKANVPSRIAFSVSSGVDSRTILDMNGAEKLLGNGDMLFYPQGLQKPVRVQGAFVSENEIARVTDFIRAHLTSQPVYSETIKKSIETAAISSPSGASGSDKDVYFEEAGRFIIEKDKASIGMLQRVYKIGFNRAARIMDQLCEAGVVGPEIGTKPRQIKMTMEEFETYLNGNQMKTDIEIAQETAMLPIKDVAASIGVEEDDLELYGKYKAKFSDEYLKKVQSNPNGKLVLVTAINPTPAGEGKTTTTVGLGEAFGQLGKKAVIALREPSLGPCFGIKGGAAGGGYAQVVPMEDLNLHFTGDFHAITSANNLLAAMMDNHIQQGNALDIDTRQIIWKRCLDMNDRVLRNVVVGLGNKMDGVVREDHFVITVASEIMAILCLADDMEDLKHRLAKIIVAYNRAGEPVTAGDLNAVGAMAALLKDALKPNLIQTLEHTPAIVHGGPFANIAHGCNSVRATKLALKMADIVVTEAGFGADLGAEKFFDIKCRMAGLKPDAVVLVATVRALKYNGGVPKTETSVPNLEALKKGIVNLEKHIENLQKYGVPIVVTLNAFITDSEEEIHFVKNFCEERGCEFALSEVWEKGGKGGIALAEKVLDTLEHKESHFEVLYENSLSLKEKIETVAKEIYGAATVTYAPAAEKALKKITEMGFGDVPVCMAKNQYSLSDDPKLLGRPENFNVNIREVYVSAGAGFVVAITGAIMTMPGLPKKPAAEGIDVTTDGVITGLFMAFLIDGKKISSQIKDELKTEIAEMKKKGTEVTLAVIQVGNDPASSVYVGNKKKACAYIGIRSLAYELPESTTEMELLTLIDELNNRKDVNGILVQLPVPAHINEKHIIEAIHPLKDVDGFHPRNVGALVTGEDGFVSCTPAGIIQLLKRSNIDIDGKECVVVGRSNIVGKPMAILLLRENATVTICHSHTKDLKEVCKRADILVAAIGKPKFFNRDYIKEGAVVIDVGIHRNEQNKLCGDVDRDDVMDLVSAITPVPGGVGPMTIAMLMYNCVEAVRLQKTERMSNTNSNNLTIFFVSLGCDKNLVDSEVMLGILRAHGFTLVDDEMEADIIVVNTCSFIHDAKEESIQTILEMAEMKHSCRCKALIVTGCMAERYKDEIMTEIEEVDAVIGTTSYQHIAEVVAEVLEGQKVKQFDDLQAMPEVDVQRIMTTGGYSSYLKIAEGCDKHCTYCIIPKLRGSYRSHSMDYLIKQAESLAAQGVKELNIVAQETTVYGTDLYNGQKMLPELLKRLCRIEGLSWIRVLYCYPEEINEELIQVIKEEPKICHYLDLPIQHGSDAVLKRMGRRTTQAELRSIIGRLREEIPDIALRTTLIAGFPGETEADHQEVLQFVKDMRFDRLGVFTYSEEEGTPAAQMPDQIDEAVKETRRDALMMAQQAIAFDKSEEMVGKTVDVLIEGRLPEEDVYIGRTYRDAPDVDGYVFVHAEEDMISGDIVKVKITDAQDYDLVGDVIYEFTEMNLPNKLTVLRVILVPFFVFFLLGADWIGSFSPYIALIIFIVASLTDMLDGKIARKYNLITNFGKFMDPLADKLLVCSALICFVDMHRMPTWVVLIVIAREFIISGFRLVAAEGGTVIAAGIWGKYKTAVTMITIIFMIPNFGGAAVHMIEQIMIYLSLALTVISLIDYLIHNKSVLAGKMMKIVKRFLFIISALLVLMLAGCSGKLSHIDINTTLTVDTTFNGSREMTADIPAAAYKYAFGGSLTALEDMINQYTPGDMYCTATENEDGGVRIQMIIDFASRNEYQKKIETICNGNTTDSAITPVINFDYSHSILKNGYTIEENFTSMDLFYWLADAISKEYPAMEGKNIQDIFQLGKTEVVFNGETMEMQDYIKISTIKSNAFDNVSVAAQLSDDQSVDARITYVVSNKVVAALGTRLKTLMDGLVPDNASMTYQDGDSSRTYTISFESATLQNYITNVNKALHTNNTVFEVSTEGDTESLSAKKSIKQYYDGSYFLDFTAEGTTMSYILDVSPEYTVESCSSTYGYLKDESSTYSSDTCEITMTVASADEVTAVLGFAVDIDEVDITTDIHSDTNIQRTFEFHLSSDAVNLIGSSIEDRLNTAAEQWPDQMTVNTENVLSNTNYSIVLSAESADELTKMTRAVLGESDISDDNKSNSGELTNSLFTGGTEKHKNPWNIHCTYEDTLNLSGFLKGSQIKNGIHYKLSYSKGFKAAFTENNTFEDAAADGPTLTCSTFNKVLSVKSTAEKNNLEGILIFALWIASLICIVVILLLNIEHIINLVSNKKIDISGSELFKGKHLRRLTALIVAIVCFVLMTIRLIFRIYMKHMSDKKIIITLGRECGSGGHEIGEKLSKKLGIAFYDKNLIELAAKHSGLDLNVLGATDEKAPSPFISPYAPTIADQLYRAQSDVIRDLSEKESFVIVGRCSNSVLEDREDVLNVFVYAPLRNRVHRVMERHLIDSEDKARKEVLRTDKIRRTYYQYYSEYRWGEHESYDLMIDSSVFGIDGSVDVIVDAINRKFRMHQFYSLCSQIIGGIVVCLLIISFSVTLTLNFRPLYYADIQNLHITELSGREEKDIRSNYDALIDYNSLFNHQPLKFPTCAMSESGRIHFEEVKKIFDFFGWLFVGTLLLTAAAAFYFIKMHAWLWLRIAGILCIALPAFLGFMVAVNWDYVFVTFHQLVFNNDYWLFDSSTDPIIDILPDGYFMHCAIMIFALVFVGSFLCFIFSHLLKRRSGMELLYKSTRSADKTVTASYAILKGLAEDGGLFVPTSFPKLDVSIDRLADMSYQEVAYEVMKLFLTDFTEEELKHCINSAYDQKFDTEVIAPLVKADDAYYLELFHGKTIAFKDMALSILPYLMTTAARKNNVKNEIVILTATSGDTGKAALTGFADVPGTKIIVFYPKDGVSPVQEKQMVTQKGDNTFVVGIHGNFDDAQTGVKKMFGCETLNRELNAAGYQFSSANSINIGRLVPQIVYYVYAYAALVHNGEIKNGDPINVDVPTGNFGNILAAYYAKNMGVPIAKLICASNTNKVLYDFFATGTYDRNREFHVTTSPSMDILISSNLERLIYQIAGQDAAKDNQLMKSLSETGVYGITPAMRENLKDFYGNYATEEETAKVIHDLYAKTGYVIDTHTAVAASVYKKYVTETHDTTPTVIASTASPFKFARSVMTAIKGDVSQYSEFELVDQLTAVSNVAEPAAVTEIRTAPVRHTTVCDKTEMEATVKKFLGIMLKKFVRTMAYIGGIVTGFYLFASAPGIHKKKKWQHLTGWDYAHRGLYDNEHGIPENSMAAFRRAVDKGYGIELDVHLTADNQLVVFHDDTLTRMCGMNKKISSFLYSDLMQLRLLGTEEGIPLFKDVLELIDGKVPLIIELKVDGSNQNLLCPLVWQLLSRYKGDYCIESFHPFVLQWFKRHEPQVVRGQLSCNFFKENPHCDIVLFLMSNLMTNFFTHPDFIAYKYLDLDNPAVIYNRKLFHIMTVVWTIPGKPTYDRFKNKVDVMIFEGFEPMKRIQPVILLLAAMTLFLFYRQSHRQSFTEGITRAQTARMLAWTVCDMNKDRAKSVEPLIDVDSTLWYADEITTVLAEGILKKDGDLFHPIDYLTWEEASNIADFFDISLSIPVFQKRKPMPLEKWLQFFDRLLAEQDIDIKLIKKEQKILAVPSASDTLDRWQVKTDSGIYSCEGLALEKYLDQTVTAYIYQDQLLMAVPADHQQAEIITASTSVDTDNTKAAEAPSESFSQNDPLPAASAPDIRVCIMNDDFSSEAHKNLRLTSDAAWQLTFHNKVIQYPADEVVELNIDDFSEDGETAEAVPENHHCMTILSINRSCGNPSYSGRLQIMRSKDALFLINILPTETYLKGVVPSEMPASYHLEALKAQAVCARSYALSAVKNPKYDFADLNDSTSCQVYMNQGTDTQTDLAVDATACEVLSSRQKIVTAKYFSSSCGSLSSSDDIWGYPDTASQDTHMTERLETEPPGIPALSSEEAFRNFIFQPAENTYLESSDPWFRWQTELSMAHIRSNIAESFAKRMSADPKRFTVLSSDGTIDPDDISQIKIVKRAESGVLQKIKLTGRNQELTVSGEYNIRCLLVPSSDTAVILQDKSTRNGMSLLPSGYFFLEEINDGEQITGYKIYGGGFGHGAGLSQNGADTLAEKGYDYREILTYFFEGINIENVNTLEMHSILRWVKGFLKKNTEDHLGAYASQAAFFIVLSAFPFCIFLLTLLRYSPLTYEDLLNILQMLSPKMANDVIRLVMKEVYEQSTIAITSFTIIFVLWSAGRGILSITRGINEIYHINETRNYFYIRFISAVYTLWLAVALIVTLGLLVFGNVFYRKVIKLLPVLHDFAAFVISIRMLIIFGLLTMFFIFVYKVLPNKKTPLLYVLPGAISCSIGWMITSSIFAIYFNYSHSFIYMYGSLAGIMMIMLWLYTCMYQLFLGAELNNLLHPESISGDTAEDIFKYMKDRLQKIRNEAIAQIKAAGGMDALNDIRVSFLGKKGELTAIMKSMRDIPPEERPAFGQMVNEARQEIENSLDTMKKDLAAKARELQLKSEVIDVTLPAKKNHLGHRHPNSIAQEEVERIFTGMGYEVVEGPEIEFDYYNFEALNIPANHPAKDEQDTFYITKDLLLRTQTSGTQIHTMETQPLPIRMIAPGRVFRADELDATHSPNFHQIEGLVVDKNVTFADLKGTLAEFAKQLFGEDTKVKFRPHHFPFTEPSAEMDVTCFKCGGKGCRMCKGEGWIEILGCGMVHPHVFEMCGIDPEEYQGFAFGVGLERIAMLKYEIDDMHHLYENDIRFLKQFMRTSLKWIKDLVPGIEDLTPQEYLDAMTLSGSKGEYYVELDKNLENIVIGQILKIEKHPDADKLVICQVNVGQEEPVQIVTGAPNVFEGAVVPVVLAGGKVAGGHDGSTPPEEGIKIKKGKLRGVPSNGMMCSIEELGSSRDMYPDAPENGIYIFKNRDDIKPGDDAIKALGLDDAVIEYEITSNRVDCFSILGIAREAAVTFGKPFCPPVVEPTGNDEDVNDFISVEVNDTELCPRYTARVVKNIKVGPSPEWMQRRLAAQGIRPINNIVDITNYVMEEYGQPMHAYDLSTIAGQKIIVRRAEDNEKFVTLDGQERTLDSSMLMICDAEKPVGIAGIMGGENSMITDDVDAILFEAACFDGTNIRLSGKKLGMRTDAQSKFEKGLDPNNASAAIDRACQLIEVLGCGEVVGGMVDVYGKVKEPHEIPFQPERINRLLGTDLSAEQMLDYFKSLELEYDADRNVMIIPTFRQDLLGTADLAEEVARFYGYSNIPSTLPSGESTSGKVSFKHRVEDVAKETAEFCGFSEGMTFSFESPKVFDKLRLDADDPLRQAITIANPQGEDYSIMKTTPLNGMLVSLARNFNRRNKDVKLYEMAKIYLPKSLPLTEYADERVQFTLGFYGEGDFFTMKGVVEEFLERAGMHDIVDYDPNAGKNFLHPGRQANIIYQGKVIGYMGEVHPEVCENYDMKTRAYIAVLDMPFITEMATFDRHFKGIAKHPAVNRDISMVVKKDILVGQIEKVIREKGGHHLESYHLFDIYEGSQIKAGYKSVAYSITFRANDRTLEEKDITAAMDKIIAGLEDLGIELRKMKTSDFYYDLPEELIAQDPLEDRSSSRLMVLDRESGNISHHIFKDIIDYLNPEDCLVINDTKVIPARLYGVKEDTGAHIEILLLKRRENDVWETLVRPGKKAKPGTRLTFGDGRLKAEVIDVVEEGNRLIHFEYEGIFEEILDQLGEMPLPPYITHKLQDKNRYQTVYAKHEGSAAAPTAGLHFTPELLAAIEAKGIRIARVTLHVGLGTFRPVKVEDVTQHHMHSEYYQVTQEAADIINDTKKRGGRVIAVGTTSTRTLESVADEDGTMHAAGGWTEIFIYPGYKFKCIDALITNFHLPESTLLMLVSALAGKEHIMHAYETAVQERYRFFSFGDAMFIKMDVDREQLQKLREQIGRKAHLTSMLDNLYVQEKEQKEKVEELRQEKEDEQKDVDRLEDRGLTALFYSLIGKIDEKMTKEQKEAYAASVKYEAANQELKAIQYHIHTYVKELDYLKGCEATYNKLLKAREDEIRLRNSDKADRLLHLDEQISACSSRIKELQEAISAGQKAAFTTDCVLSKLDNAEAWGTWDILGGGLLSTAAKHGNLDDAQSYITELQMDLRHFNTELTDISVQTDVHVNTDDFLRFADYFFDGIFADLAVQKRIKQSKEQVQGIKTEIESVLEELERILDEEQHLKETLQSEIEDVLVEMSKNTKECYENRELSWLKFNERVLEEAADKNNPLCERLTFLSIYQSNLDEFFMVRVGSLIDQKLLDEDVRENKTYMTAEEQIDAVLRQVTRMMRSTNHIYDDLMDELERQQIRLINFQMTTEAEEKDLQLYFEHEMLPLLSAFVVGKKQSFPFLNNKAIYALAVLETKNDKNKIGIVPCNTGVFNRLISIPGRKGTYILAEELILHYLPKVFPNYRIGEKSLIRITRNADIDVDSIYDEDLDYREHMVDIIKRRKKLTPVRLEYTRKIDGPILDRLCTQLGIERKQTFYCQIPMDMSFFSVIQDTLRHKPDLFYPKRVSQKSPMLDESQPLIPQIIKHDVLLSFPYEQIRPFLNMLHEAASDPDVVSIKMTLYRLARHSKVVEALIEAAENGKQVDVLVELKARFDEENNIEWSRQLEDAGCHVIYGLDGLKVHSKLCLITRKTEKGIDYITQIGTGNYNEKTARLYTDLSLITARPEIGMEASRIFQALSLGTVVDKTKHLLVAPKCLQKPVLEMIDNEIAMVKSGQEGYIGIKINSLTDKKIIAKLIEASEAGVKIDMVIRGICCLRSGIEDLTDNIRIISIVGRFLEHSRIYIFGTETRARIYIASADFMTRNTTRRVEVAVPIEDVDLRARIQEMFITMLSDNVKAREQQPDGTYVCLTPEENAPLNSQEYFFDAAYAAAENNNFRMSLMEDWEVLANQYNTDQATAQKFWTDYYMQEKAVYEKMLTEPVEVEKGTVAELAEKYGMDVVRFGGFLDGINESLKTPNPVDTIVAESEVTVDIDLEKLYYNMVAAKADWLYNLPQWDALLTEERRKELYKAQKKSMTVVKGKKIGRNDPCPCGSGKKYKQCCGRMSILNVEHLSHGFGDRAIFQDVSFRMLAGEHIGLIGANGEGKSTFMSIITGTLMPDEGKIEWAKNVRVGYLDQHTVLEKGMTVREVLTSAFDFLFEMEEKMNHICDNMGEMSPDEMDTAMEELGTIQDLLMMHDFYMIDSKVDEVARALGLTDIGLDRDVTDLSGGQRTKVLLAKLLLEKPDILLLDEPTNYLDVVHIEWLKRYLNDYENAFILISHDIPFLNSVVNLIYHMENQRLDRYVGNYDQFQEVYAMKKAQLEAAYNKQQKEIAQLKDFVARNKARVATRNMAMSRQKKLDKMDVIELASEKPKPEFNFKLSRTPSRYIFQTKDLVIGYNEPLSTPLNLEMERGQKIVLTGANGIGKTTLLKSILGLIPSISGTVEQGDYLNIGYFEQEMTGDGTKTCIETLWDEFPSFSQYEVRSALAKCGLTTKHIESQVRVLSGGEQAKVRLCKLINRETNVLLLDEPTNHLDTDAKDELKRALIDYNGSILMVCHEPDFYDGLATDVWDCTRWTTKIFMSLIEILIISIGLSLDVYAVVVCQGAVLLKIEKTKLLKMSLFFCAWQVVAVSIGHTVTLIPYLTDIAKNVSYVGEFISVIIFTVIGVYMLYKAWKNEGILERLSDVNYKQLCVAAFFTSLDALFAGMGFGLLKARFYIVALSILIITAVMVILGLYTGMRLGYEQKTKAYGIGGILLLISAIDVVLKYLAMNTTLDKISHKAQRAAASVIIDKVLAMVDKDREKGFLELVDWAEQFWGNGFSKEDYDKVRTAIKDPDNRWIKFINRVLDETDPHVAKMAALNLGFEAFFRGTKMIRKNREIYHCNIPWLILFDPTSACNMHCQGCWSGTYGHKANLSFDDMDKIITEGKELGVYLYMMTGGEPLVRKADILRLAEKHNDVELSIYTNSTLIDEDFCKEVVRLGNITFQLSIEGTPETNDARRGDGHYAAVMKAMDLLKKYGIIFGTSICYTRANIEAVTSDEFLRMISEKGARFGFYFHYMPVGNNAVLDLMPTMEQREYMIKRIREIRSPQCDIGFFPMDFQNDGEYVGGCIAGGRNYFHINSAGDAEPCVFIHFSNTNIHENSILEILQSPLFMAYHNGQPFNNNHLRPCPMLENPEFLQKMVHETGAHQTNMESPETVEHLCSKCKNYAEEWKGHADKIWAEETHKTPQYTNYKKMSAIHLFQTSHINLHVNILKSMISITRICKLYLQFFLFVLYFLILLQLSMQPGGKFMERKKMTKALIGESLKVLMRNHPFEKITIKMITDEAGVIRPTFYNYFCDKYEVVEWIFNEYIIEKVRAMFEQKMYTEGLKLLFVCMKNDCAFYRKAFEITGQNAFTDIIRNSLHNLFLSEMSEIYIENQTNNPLVTAELVAAFYANSLSNLLQMWIQSNNQQCTAENMVEAYAYLLSHRIQDFIDPTENPAENMSDKTIGFIGLGLIGGSIAKALRRVHPEYRLIAYNRSRSSLVEAMSDGTINQATDVIDASFAECDFIFLCMPVSVNIQCLKKLKDLVPDTCVITDVGSVKSTIHEAVRELGMEARFIGGHPMAGSEKTGYTSATDRLLENAYYIITPTALSNPDKVAEMRQLVTDTGAVPIVLNCEEHDYATAAISHLPHVIAYTLVNLVRTSDSREGLMRQLAAGGFKDITRIASSSPDMWESICLENQGQLLKVIDAYKASLEDISEAIRENRGDKLHCFFEEAKDYRDSMPMKMKGSIEPAYEIYVDLIDESGAIATIATILASNRISIKNIGILHNREFQEGVLRIEFYEQDAVEKATALLSKYSYIIHTRMKVYKTQDIRNVAVLGHGGCGKTTLVEAMANVTGVTSRMGKVVDGNTISDYDKEEIKRKFSISTSIVPIEWRFWKINLLDTPGYLDFVGEVEEALSVADGAIIVISGKAGVEAGTERAWEFCEKYDIPRVFFITDIDDDNADYAKIVEDLRALYGKKIAPFHLPVKEDGKFTGYVNVVKMLGRKCTDDGNKFEDIAIEDMHLSDALQAELEPCREALLEAVAETSEEFMDRYFEGGEFTIDEIIDALRQNVNDGNVVPVQCGSGLYNISIENLVKTCVEFLPSPIRDTVKIFGKDPRTDKEYNVDYDSRRPFSAYVFKTIVDPFIGRYSLIKVCSGELKADSVIYNYERETEEKMNRLYVLRGKEAIEVPELKAGDIGAIAKLTNTETGDTLSLKSDPLVFDKFELSAPYTYKRYAAKNKADVDKISQALQKMMEEDCTLKTFNDKENRQLLMYGMGDQHLDVVVSKLAAKYKVEITLSKPRVPYRETIRKKVEVREKYKKQSGGHGQYGDVAMEFEPSGDLETPYVFAERVVGGAVPKNYFPAVEKGIQESIGKGPMAGYPVVGVKATLFDGSYHPVDSSEMAFKTAARQAFKSAFMKATPVLLEPIASLSVVVPDSYTGDIMGDLNKRRGRVLGMNPVGNGKTEVVADIPLSELYGYSTNLRSMTGGRGVYSYMFDRYEQAPSDVQERVIAENANEAEEMKPFEIHSDHDPETWLRLWDSKIVEFTSKNKGAYSGERCFFGTHEKNQLMVFFHSDYDTVYLSTRFMGTIEPDGTGSKISGVIGKMKSAIFFLWFMVAAMGIGGIVMLSQHLWQQAILLFALAIIAFFCAKITPKDSIVRLEKLLNLISTLPAETLQPENTDLSSEEAENTASETEMKYDFAKIESKWQKKWADADLFAAKDNSDKPKFYGLVEFPYPSGAGMHVGHIKAYSGLEVVSRKRRMQGYNVLFPIGFDAFGLPAENYAIKTNTHPRIVTDQNIERFSNQMKRMGFSFDWDRVIDTTQEDYYKWTQWIFLKLFEKGLAYRDKTLVNYCPSCKVVLSNEDSQGGKCDICHSDVIQKSKEVWYLRITKYADKLLEGLNEVDYPDNIKQQQQHWIGKSTGAFVNFKLDNEQESLRVYTTRPDTLFGVTFMVIAPEHPLIDKYADQIRNMDQIEAYREECAKKSEFERIEINKDKTGVKIDGLMAVNPVSGKKVPLFIADYVMMGYGTGAIMAVPAHDQRDYDFAKKFGEEIIPVIKGGDIDTEAYTGDGEMINSDFLNGYTNKKDSIEKMIEVLEEKGIGEKGVQYKMKDWAFNRQRYWGEPIPIVHCPKCGMVVVPYEELPLRLPKVEHFQPGEDGESPLAKIDSFVNCKCPKCGGDAKRETDTMPQWAGSSWYFLRYIDPHNTEALADPKKLKYWMPVDWYNGGMEHVTRHMIYSRFWHRFLYDIGVVNTPEPYAKRSAQGLILGPDGTKMSKSKGNVVDPLDVADKYGADTLRTYILFMGDYGASTPWNENSVRGCKRFLDRVYRIFEKVTDENLHSLDNPLHKAIKKVSDDIEDMKYNTAIATLMALLNDFESATTVGKEQYVTFLKLLSPFAPHITEELWEMLGGEGFLSVSEWPVYDESKMVDETVEIGVQVNGKPKDAVELSLDDDEETAVAKAMALPKIANITAGKNIVKVIYKPGKILNLIVKMTRVDWASHPAVRKIDIRKLSVLMALINQSEGKSFSEMIPSIIEANKHLTAMGLAFTNDEIKLIFDVMKKDMSEEEMKQFNKLRSLMNLPTWLMIDTEKIPLTEADTAAYDSTAQILKAAMAYVNPSIGRMMAVMAKSIELRHMMQYLDQGGVSACGVNNRAIPPEEVIRDLRKYCGAKEKEQLDRCLNMMNMAKMYEMYRNFSGSGDLSAMASMMASASGADSGESTNRDGNTCSASDTDYLRKMQSMLTPEQIQLIRHMNGQQNTMDKQKSVSGYPFHNEETSMHPHSKIIRQDSETFIVEDENTIYEIDKHCAARHGYLPQQRSMSDLAATGCCNDCGCNGLTNNNGNGCGGGNNWIWILILLCCCNGSNGCGCGGCGNDSCGCGNNNWIWILILLCCCCNNMFEITRLKMIDIIHQCMDEQIRPGDTVCDCTMGNGHDTAYMCRLTGDTGTVYSFDIQPEALSRTEALLAEEHLLTPAHLILDSHSHLKQYIDHPIRFFVFNLGYLPDGDPTVITKGTSTLEAIEAALSITETGGGGAVLSYYGHPGGAEEKAAVEEFLHNLPPKYFSVMKIDSFNRKNTPPVLYLIKKLKDNRKIMIIDSQMTELGYSLKSYRVRNNITQQELADRLGVSTNTIHLWETKVCKPSMGSLLILSDMLNEPLINIIEKANRSYYMKKPVLVIMAAGMGSRYGGLKQIDPIDSDGHIIIDFSIYDAVRAGFEKVIFIIKRENEQIFRKTIGKRAEGLMEVAYVFQELENIPDGFTVPEGRIKPWGTGHAVLSCIDILNGPFAVINADDYYGPEAFKMIYDYLTTHEDDSRYRYTMVGYRLGNTLTENGHVSRGVCTVDSKGYLTGICERTYIVMTPDGAAYSEDDGQTLIPISPDERVSMNMWGFSASFMAELKKQFSDFLTNEMPKNPLKAEYFLPSVVSSLLADNKATVQVLHSNDKWYGVTYKEDKATVVAAIAALKQRGIYQMMVMRKTKIVCTLGPATNNEEKIRQLMLNGMDVARMNFSHGDHASHLATLNIIKKVREELNLPVAALLDTKGPEIRVCKFKNDRIELHTGDTFTLTTRDIEGTQDIVSITYKNLINDVQVGGRILIDDGLIELSVIKKTDTDIICRALNNGAVSNNKGVNVPDCHLTMPYISQKDYDDIVFAVENDYDFIAASFVRNAQDVLDIRKILEDHNGTDIKIISKIENMQGVQNIDEIIRVSDGIMVARGDMGVEIPFEDVPVLQKMIIKKVYEAGKVVITATQMLDSMMKNPRPTRAEATDVANAIYDGTSAIMLSGETAAGLYPIEAVQTMVKIAESTEASINYRKRFKERTTLVNPDITNAISHACCTTAMDLNASAIISVTKSGFTARMVSKYRPECAVVACVMNKKAYRQLNLSWGVTPIMMCQLEENTDQLFDLAVDTAEKTGIVQQGEVVVITAGVPLGVSGTTNLIKVHVVGHVLMKGKSINDKVVSGNLCVCKTASELLHNYKPGDIIVIEETNNEMMPQLRTASALIVEKGGLSSHAAVVGMSLDIPVLLEAKNATEILKQGAFVTVDSKKGIVYANKMILQLLQIRHITIQTKNNPAIGLGAACRIIFCLLFQLYEYDKMNIVRQRTGTDSAYKQNLYGSGIGIAVLDSGIYPHPDFMNHGSRITAFRDFVNHRQTPYDDNGHGTHIAGIIAGSGYLSEGKYMGMAPRAHLIILKILDSKGNGTAETVCRAIEWTVRNRSRFHIHILNISIGAKAGEETTESRMLIDAAEYAWDRGLTVVAAAGNNGPASGSVTSPGTSKKIITVGAAHEITVPEHPSSSCLFSGRGPTRTCICKPEILAPGFRICSCGHLPAHPYVIRSGTSMASPVVSGGIALILNKYPDLTNKEVKRCLLKSARPLNYPKSYQGWGFFHIPECLDGRCGSHMILSCQQISLAFGTEVILDKISFHIEEHEKTAIVGINGAGKSTLLKIIMGELTPDSGEVIISRGKTIGYLAQHQDIHSEATIYEEMMKVRENVVRIYDKLRQLELDMKHADEDKLPEMYAAYDRLNHAFEQENGYALQSEVTGVLKGLGFTEEDFNKKVSSLSGGQKTRISLGRLLLTKPDIILLDEPTNHLDMKAIAWLETFLQNYKGAVIIVAHDRYFLDRIVTKVVEIENHKARMYSGNYSAFAEKKAQIRDAELKAWMNQQQEIKHQEEVIAKLKSFNREKSIKRAESREKMLEKTERLEKPQEVNTYMHLSLIPDVQSGNDVLHIEGLSKAFGEQRLFFNIDIDIKRSEKVALIGDNGTGKTTILKIINQVIPADKGLVHLGSNVHIGYYDQEHQVLDMNKTIFDEISDTWPSMTHTRIRNVLAAFLFTGDDVFKYIRDLSGGERGRVSLAKLMLSDANLLILDEPTNHLDIMSREILENALRSYSGTVLFVSHDRYFINQVATRILELSENGLANYNGNYDYYVEKQLNPSATESSGESVASETVTTETVSAAKMDYKQQKELQAKERKRKNQLKKTMERIDAIDARLKELDELLVQEDVYTNVSRLMEINKEKEALDEEQLTLMELWEELEGDDDSLDMEIVSSFELNNTEYVYYIYSYVYNKTLIDNKISFRYNKHVMSERGISSAVIRRLPRYYRYLGELLENNVVRISSKELSIRMKVTASQIRQDLNNFGGFGQQGYGYNVEYLFEEIGKILGLNTIQNMIIIGAGNLGQALANYDFDRIGFKVIGIFDANPRLEGLAVHGIEIKMVDELEEFIKTHEIHVATLTVPKKNARTIASQLEEWGIRAIWNFAPTDLHVSDDVCVKNVHLDESLMTLSYNFRNRGKEKYSYHSYMDDMEYLVTGRQAKAIDTYTIEHTGIPSLVLMERASLTIAEETAQVAAQLKLPAVRIAAVCGSGNNGGDGIAAARILHSRGYDVTIFFAGLREKMSPDCQKQLSIAENLSVPISNDTDLDAYNIIIDAIFGIGLDRPVTGTYKDWITAVNSASENGSKVIAVDTPSGIHTDSGQIMGTAVHADRTVTFGYIKKGLVLYPGASCAGKVICRDIGFDPAAAKTIGLQYITYTKEDYKRLPKRYADSHKGTYGHVLVIAGSKNMAGAAYFSALAAYRMGAGLVTLYTPESNRCILQQLLPEAVLKTYPDTAPDLSALSDQLNNYQAIILGPGLGQNAASENIVRTVTASDIKIPLIIDADGLNILSKNMEWLSKSTVPTVITPHMKELSRLTGHNIQYLKENLVQVCETFTREYGVICIAKDTRTMIIDNSETIYINLSGNNGMATGGSGDILTGIIAGLCAQHMPLSEAARLGVYLHGCAGDTAAFNKGFHSMTASDVLNAIPELLKEITLDMKNTYRACAEINLDALKHNIQEIQAVLGDTKLMCVIKTNAYGHGSIVLARELAAMGAYGFAVATVDEGIELRNNGIIQPILVLGFVAKEQYADMITHHIMPAIFTYSMAKDFDAVANAMHTVADVHIKLDTGMSRIGFKSDAESIEATVQGIVMINSLLKNIRIDGIFTHFACADCEDDHMTFKQLKRFDNVIDRLEKNGVHIPIKHCANSAAIIKYPGMRMNMARAGIIIYGLYPSDEVDREVIKLEPVMRLKSHVIYVKTVEPGTTVGYGATYVCQRPTKIATVSIGYGDGYPRALSNKGRVLIGSQSWPIIGRICMDQLMVDVTDADYEIKQGDEVVLVGSQGSESIPVEEVAAINNSFNYEFVCDINRRVPRVYYRDGEVVDIVNYLRMIIKRGDIYYADLRPVIGSEQGGVRPVLIIQNDTGNRHSPTVICAAITSRMNKAKLPTHVELDAEKYRLIKNSVVLLEQVRTIDKKRLKEKVCHLDNEILKKVDRALSISLELDTMDDGHPIIRIVIFIILLLIDAAFTGTEVAVSAVNESVLTKKKEEGDSRAARILRFVGQPAAFMSTIDLIGAAVTIIAGAFVARPFFTDLTFLLMTQARLMYWPAAVISHLLVCLIIIYFVTVFGILFPKRLAFKYAEKWAYSAIRIVTLISTLCRPFVALINGSVGLLVRLAGINPKDIEENVTEEEIIMMVSEGHEQGVIEASEAEMISNIFKFDDKEVSDIMTHRRHICAVDCSLSLSEAAEIMARERYSRYPVFENDTDNIIGILHLKDVMRLIVSGETDTSIKEVMRKPVFVPDTQNINSLFREMQAKKMHMAIVVDEYGQSCGLVAMEDILEEIVGNILDEYDPDEDNIQIIGGAYLMKGLTPLEDITRTLGITFDDNFETLNGLLISKLEHIPQNNEFASIDIDGYTFKVMNVKDNAISLVKVTKITGMSGHSKFANIKHKKEKNDAAKGKIFTIIGRELAVAVKEGGSDPNNNSRLRDVIAKAKANNMPNDTIERGIKKAAGDLGSVNYENNTYEGYGPSGVAIIVETLTDNRNRTAANVRSAFTKGGGSIGTSGCVSFMFDKKGQIIIDKEECDMDADDLMMIALDAGAEDFSDEEDSYEIITDPDDFSAVRDALEKEGIPMAEAEVTMVPQTWATLTNEDDIKKMNRILDLLDEDDDVQNVYHNWDEMYQFGFIGMGNMGSAMLKGCLSVFPASTIAFSRKDAVKGKALSLETGAVWVDSNRVCAEQSRYIILAVKPQFYDGVLKEIQPVLDDSRIIISLAPSYTIADLKQSLGASARIIRAMPNTPAMVGEGMTGLSWSEDVFSDTERQELMQFFTSFGKAETVPENLMDAVTAASGSSPAFIYMMIEALADGVVKYGMPRDKAYTFVAQAVLGSAKMVLETGEHPGVLKDKVCSPGGTTIAAVAALEASGFRSSLIEAVSAVCDRCRNMMGILLSIVLLLMTQGSSPSTFFCQSDYDRFILDFTTDSGFFIYLFLCRCIPFYLLIALTLKTRRKIFCHLYFWYIGFIYGTVGLLSAFEYGITGLILCIFRLLPQVCFYVPALYATWRMTAGFTDHLLPINKRLLVIGLLLWTIGTAVEWAFNPVLLQYGIQLLLMEQQLDNFIHYLEAVRKSSRNTILSYKRDLEKFAAFLDAQAVVDLTDVNETTMNAYILMMEQKQFATSTISRNIAALKSFFDYLERYENHQGNPAARLKAPKIEKKAPEVLTVAEVTRLLEQPAGRNNKELRDKAMLELMYATGIRVSELVSLTIDDINVQAGYIRCSERGRERIIPIGSVARISLRQYLKQARPAMISDDSSAILFPNYSGQPMSRQGFWKILKQYAAKAGIESDITPHTLRHSFAAHLLENGADLRSVQEMLGHSDISTTQIYLKMNTGRIRDIYSHTHPRAMKRGMRKTAAACCIALLLLSGCGKTAGNVNSDTADSSAVTEQSGSEESAASQSDTDDIDSMFTDRDKEVGYDEEKCVAITLSDDGSSCDNTSVAIDGQTITITEEGTYLLSGSLSNGSVVVATDENVKVRLIFNGVVINNDSSAAIYVQSADKVFITLAPDSENMLSNGGTYEAVDDNNIDSVIFSKSDLTLNGSGSLTVTAKAGHGIVSKDDLVITGGTYAITAASQGLSGKDSIRILDGDFAITSGKDALHSENEDNAEKGFVYIAGGNFNLTASGDGISASGNMTLLDGMYTMTTGGGSENGKDHQEGGPGGSGGPGGMDNPGEDMMTSGERPKENRGEMSDNDQMMPPSDNSQDDTSSDNSESADNRPTSSSDDQQPSGQMMEQPDKSDEETETEETTSTKGIKAKGNLIISGGTYTINAADDGIHSNSNITINGGTLAIASGDDGVHADGQVIVNDGTIAISESYEGIEGNEKVLIVGGQITLTSSDDGFNGDTIEISGGHTEIDAEGDGIDANRILTVSGGETYVSGPTGDGNGALDYETDAVITGGILVAAGSSGMAVNFGNNSTQGSVLVNMDRQEAGTDIVLTDASGTELINWQTSKKYTSVVISCPGIAQGESYTLKAGTSKTTVTMDSLIYGTGNTMGRMGTLFSGIFDSELVSVISFSDFMLCMMCALVVGLILAGMYMYKNRYTKSFVATLALLPAIVCAVIMMVNGNVGTGVAVAGAFSLVRFRSVPGSAREIGALFLAMGSGMIAGMGYLAYAVLFAVLLGGMSLIYNRIDFGERKNAAKYKTLHVTIPEDLDYTGVFDEIFADYAEKWELVNVKTTNMGSLYKLTYQLTMQNTDKEKEMIDRIRCRNGNLEINLSRQDTVAAELMKNQMIFKRYEIKYLLTSEQRLSIQEAMKPYMQLDDFGHSVIRNIYFDTDNYRLVRRSIEKPVYKEKLRMRSYRKAGQNDNVFLELKKKYQSVVYKRRILLPQNEAFGLINNPSDIQTDSQIEKEIMYFCDYYQSLRPVVYLSYEREAYYATNGSDFRVTFDEQILSRTDRLSLDEEPGGQPILAKGMSIMEIKTPGGMPLWMTQCLTKQHLYKTSYSKYGTAYQQMLMAAVMRLLFAEDEKSLSRAITAILKNNHYEVDAVYDGEEALAYLECGTYDGAILDIMMPKKDGLTVLKEIRRQGINTPVLMLTAKAEIDDRVLGLDSGANDYLTKPFAAPELLARIRAMTRTQMTQNTSSLSFGNLSLNQTSFELSSPSGSYQLTNKEFQLLELLMANPGQVISSDRLFEKIWGYESDADPSVIMIRKLRFKLISAAMISLFIVITIIIGIVNILNYHGIVQDADGILTILQDNNGRFPQQNTQTDITKQSPEATAPVFSPDGPGSESDSIENASGVTQAEPPKGNNNPRLQSPELPYESRFFSVLLDENGTVLSTDTGKIAAVNSSEAGEYAKEILQSGKRTGFFSAYRYLRAETDSDSHTRIIFLDCSRSLNSFRNVLLISCGVSGLGLMMVLGLMILLSKHIIKPFSENYEKQKRFITDAGHEIKTPITIINADTEVLEMDTGPNEWIDDIRVQTERLSKLTKDLIYLARMEEGENQTQMIDFPLSEVISETAASFQALARTESKQLTLKIQPMLSFYGDEDNIRRLTSILLDNALKYSDENGFIQLNLEKKGKYIRLLVVNTTRDALNREQLTHLFDRFYRMDTSRNSETGGYGIGLSIAQAVVQMHKGKISAAAVNDHKIQLSVLLPIRSGRTSMYWDILNELLHKDCLQQLKKFKQHRFTTTYEHCRHVAVMSYQLAEKWHITVNEKALAVACMFHDYYLYDIKDEHLGPWHHGTRHASIAIRNAEKVYPLNNLEKEIIRSHMWPLNITQIPASREAWLVCLADKVCAVEEMFPFLATKNSHLSDSGNSMAELSYKDQQDLKNIEKIREHLQILPRFCGEYFRSLEIRKSTNTRKNYAYDLGVFFYFLKTNNPYFKDKDIHTLPIEVLDMITAMDVEEYLSYLESYTKDGKLYTNREEGKARKLSSLKSFYDYYFKKNLIRTNPPRQVDVPKIKNKNIIRLDPNEIAQLLDEAESGEKLSGRQLASHEKTKVRDVAILTLLLGTGIRVSECVGLNLEDVDFNNGAIRIIRKGGNEALIYFGDEVSQALEAYMNGPRKTVEPAAGHEEALFISLNKTRITTRSVERLVKKYSRLVTTVKKITPHKLRSTFGTALYQETGDIYLVADTLGHKDVNTTKKHYAAIDEHRRRMAANVVKLRESMKLQQLYSYTRRAIDTWQMIDEGDKIAIGVSGGKDSLTMLYALKGLQRFYPKHFELEAITVDLGLGNFNMDAVKSLCNELNIPYTIVSTEIGPIIFDQRHEKNPCSLCAKMRKGALNNKALELGCNKIAYGHHRDDLVETMLMSLIYEGHFYAFPPVTKLERTGLTVIRPLLYMTEPDIIGFARKQNLPIAKSPCPANGHTRREYTKNLMHQINRENPGAIDKMFTAILNGNISDWPQSMPNPHYHNPMRRRKMVLKRRIRMVIAAFILILIGILVIPISHFKVAASEKNMRQIEYKTYVVQYGDTLWGLADSYMGKNFKNHQDYIHDVMRANGMNQAMIYEGQLLIIPCEGDVAENTQMAAAGEDMRNMSNGKISAKQQEILEYIKSQLLAKGYPPSVREICEAVHLKSTSSVHSHLETLEKNGYIRRDPTKPRAIEILDDEFNLARREMVNIPIVGTVTAGEPILAVENITGYFPVPSELMPNAELFMLAVRGESMINAGILDGDHVIVQQQSSADNGDMVVALVDDSATVKTFYKEEDHYRLQPQNDAFSPIIVKHCEILGKVIGLVRMDMMNQSKKMTKLAIAALEDKKANDVRVIDIAGVSVIADYFVIASGSNTNQVQAMADSVREALGIAGYGPRQIEGYGVANWILMDYNDIIVHIFSDESRTFYDLERIWRDGKEVSVGEFETEEMMEIQEIEEILQQKQNPHRYRHTIGVRYTSICLAMRYGEDLIKASYAGLLHDCAKHMSGEKLLEKCRSHHLPVSDMEAKNPFLLHGRVGAWLAGHRYGVEDPEILSAIEWHTTGKPDMTLLEKIVFTADYIEPGRDQAPNLAWLRQLAFTDIDQAVCEILKQTLDYLRDQGGEIDPATEVTYSYYLQKCAEDAESMSRRKRIGIMGGTFDPVHMVHLTLAENAYHSFGLDEVLMLPNGDPPHKTDKIITPAVHRLAMLQLAVEGIPYFRISDMEIRRKGYSYSSVTLEELKKAHPDTDYYFIMGADSLFQIETWHEPAVIMADCVILAAMRNHTPDDVFKKQMDYLEAKYHADIRFLNIPDLALSSSEIRHRVREHQSIRFMVPEGVREYIEEHQLYCRMIKNSKQRAYLKGLAMNMTPIIQIGKSSVTPELTQAVEEALEARELIKISVLQNCLDDPRQMAEVLAERTHADVVQVIGKKIVLYKEGKDNKKKIVLPEKMFADQVKIYIRSGKGGDGHVGFRRELFVPAGGPNGGDGGKGGDVIFVVDEGLNTLSDFRHMKKYCAPNGEDGGKNRCHGADGEDLIIKVPEGTVIRDAESGRVIADMSHGNKRVTVLKGGRGGKGNQHYATATMQAPKYAQPGQRAMELVVTLELKVIADVGLVGFPNVGKSTFLSRVTNARPKIANYHFTTLNPNLGVVDLPDGRGFVIADIPGIIEGASEGVGLGFEFLRHIERTKVMIHIVDAASVEGRDPIDDIYKINAELEAYNPEIAKRPQVIAANKIDTLYEGENDDAITLLREEFEPKGIKVFPISAVSGKGVRELLFYVREMLDQIGDEPVVFEPEYVPVNTDVEEPYTVSVEDGVYVVEGPRIEKMLGYTNLESEKGFDFFQKFLKENGILDELEKAGIQEGDTVRMYGLEFDYYKMLTMNLQFFAHKKGVGSTKNGRDSESKRLGAKRADGQFVKAGNILYRQRGTKIHPGVNVGRGGDDTLFALVDGVVRFERKGRDKKQVSIYPVVVNEMISVTVYKDKNNHYTGFRCDGHAEYAEPGEDIVCSAVSVLTLNTCNAIEALTEDAFSVGADQETGLVDFDFDDVPGHDAALLIDALVIGMQSLSEQYSEFIHFEIEEVMYAIIATGGKQYKVAEGDVIRVEKLGVEAGAEVVFDQVLVVSGDEVKVGDPTVAGATVTATAVGDGKAKKVIVYKYKRKTGYHKKNGHRQAYTKVKIEKINAMRRAAKHAGKYILLLIMLVCFGHILAMGTEIGGYGTPVIYYLKEGYSLSTVQDMRKNDEELENYLPFTAVGSLDQQTFTNDDLGKTLTGTLTYIYGSSENLCSSDGELMEDDLTGCVLSSKAAWELFGESAITGGIVTYNEKSYYVRGVYEDTNAVVILPAEAVFDKKQSENSGQNNYPASDADTSAPSTDTGTASADSGNTGNAAQEPSFSKIVIKPGTEISGNAERTEYLQAFENRWGLGSDKTDCQIYQRLAVFFMFLLPALILILVVIRGIRFLMVNRYRPFWLAAGFVGLAVMIMVFFAICQAKPSIPADMIPNTWSDFDFWGEKITTFKNSIQHILFIDKSEVELGYFRPLTSMVGYAVVAVIMFFASGRFFKPEKAEGLYGMILAVCVTELIAVYLLHRFGVMIEGKRMMLYLWPYFVIGQFIFRKKDAKVDEKTVDRVMKLKQLMDFEMDKNKKSSLQVKAVKALAGFLILMFLLTILSRAADSLTIAKVTASAATGGVISHNIEVDGNITPNKDIAISTSANIKIASVEATEGKTVKKGDLLIQLDTADLKKKLLQAQKELQVAKATASDKKANEAIAADTKSKSLQRTYEDYNQTVADANDSVSKAKSDMNEAWNAYNTYKNSNSNSGETDTTVSDSLKKTVEEKQLAYDKAVTNLDGVEKDIEADVWKEIDKAEEASKDESGNSTLTQEDKQKIREQVNARPENVSLLQNANDQINTAKDALTEAENALSAYNEQQNNSSSASYDEQLKTLYDDYKAKEEAYNEAVKQRQSTIQSANRTLEDAKAPENVDTATALTANDDLEEKQLAVDELQKVMDVNGKITAPSDGLITKVNVTTGETTTEDTAIRISDQSAGYKFTATLDKASAKYLSKDDKVTLDLGNGTTVEGLTVQSIDVSAEDKNSYELTVSIPAKVKKLGSIATLKVEKASKKYDTCVPLGALHSDGDKYYVYVINEKDTILGTETAVDKVQVDILDKNNEQAAIEGSFSWGQQFVLTSSKTLRNGDRVRLVEGEMKHKIFKRILLLLLLVLAVIICFPVVFLIVGSLMGTDELNHYLGAVLGKADGFASWALLPTYPTFKAYVQLLLDSPEFFVMFWNSVKMTGAILLGQIVTGVPAAWGFARLDIPGKKVLFNLYIILMLMPFQVTMLSNYLTLDAMHLVDTQWAVILPAAFSTFPVFIMYHFFRSIPKGIIESAELDGANKFQVFLSIGVPLGSSGIVSALVLSFLDAWNLIEQPLTFLKSKTLWPLSLYLPNISMDNAGLAFVASVITLVPSLLVFLAGQNYLEQGIAASAVKEMKISLNKKKLTDIAFIVPSLAGVSIFVLIPFIDVLRRSFTNVSGTQFVFFSNYITIFQNAAFRLAFSNTIKFMVICIPILMIFSLLIAVFLNAGIRGANYLKTAYLVPMAIPVASVVLIWRLLFHQNGYFSGLLHMFGMQSQDWMDTGFAFWILVFSYVWKNLGYNVVLWMAGLTAIPDTLYEAARADGANNIQCFRYITMPNLMSTLYTITVLAFLNSFKVFREAYLVAGDYPHESMYLLQHLFNNWFRELSLDKMSAAAVVIALLILVLILGLQRSWDREDMKRMKKLTSIGLVLAMTVGLLAGCSGSGSGNGEDASTSGGKGRYVEENWGDPLESQDDNNYSYIQTMKQLSDGTIRAIVSDSSDRGFSVKDSTDGGKTWGDASMDLSALDQLNLGDDNTDDDGNGDYAYVGNMTIDADGDLAFVYTQSHSETKDNVTSVDSTVKYYLLTKDGKLSEIAMEIPNLQKEQHYEYNSSEDETGSKTDDSADSGVSAESETEDDGVVINENGDSDNNGDTEASNGIQTLKLKDAENLYVADYNGAVYHVTTADGKITATFDDMNYVNNMYLCGDKLLLDDYEKVYEYDTATDKKTAEHEALASVITSKGSVTIADYLKDGHTIYYSCTEGIYTYDLDKDTSEQIVDGNMSSLVSPSGNVEYLIPKDDGQILVKFSDYTGDTSEESFLNYAYDKDAAKRPDKELTIYTLKDDYTIRTLAAAYQKAHPDVYVKVESGVSGDDAVTTSDAIRTLNTEVMGGNGPDILLMDGLPVNSYVEKGLLADVSDTVNPLISDGKLFDKIAQTYKGDDGKIYAVPMTFQVPIVIGRKSDLDKLNNLSDFASLAQDFVKDHKKNENFIESYSLYSLVGDMMYINSASWFKEDGSLDSDSLKSYLNDIKTIYNAVYETLSDKDKSDMDQMKQYYASEDYEMDASWYGSDPSYMAMYIMAGMNRIAYGNMAGTSSLGDLASIMRKDADINYKALPGSVQNVYVPSEIIGINAKSKNIDTAKEFYAFALSVDGQKAIDSYSGFPVNKERFDASLVDPDAGTEGYDPNESKGSWGMTDEDGNEISVDSYWPTDDQIAQLKNLIDSLDTPSYGDYTILSTILKDSMNAIIGDTSVDDAVEQVVKDIDIYLSEMKRQIVITGWQSKVLTALYEEDTLCELNLEPKKSQVRVGDIYIGKVKHIVQNIQAAFVEITPGVMGYYPLKDNAVHFVVNQKKNDKIVAGDEIVVQVEKENLKTKAWFLTGRLSFPGRYTVLTKGKTGIQISARIKDTAERDRLTGIVSGEEIEGAAWMIRTEASGQRAEVIGEEMHRLEVDYNRIMSTSCMRTCFSKLMSGDSPYTQLIKKFAHGSTCRVTTDLPEVYDELKENFGRWGLSEEALQYYKDDSYPLIKLKGIEAQMDKALQKRVWMRSGAYLVIEPTEALTVIDVNTGKAIGKQKMEENFFKINLEAAQEVCRQLRLRNISGIVIVDFINMKDPEHLKALMDVLREEAAKDSVQTTVVDRTSLHLVEMTRKKVHRSLAEQVRLLPVMKLRMRFGKEGIVKFIGHLDIMRYFQKAFRRANVDITYSQGYHPHPCLSFASPLGVGLESRGEYLDMEVNSFDDLEAMKNAVNAQMVEGIVVYSIRHLPDQAKNAMSIIAAADYEVGFREEMAPCETKQLKAAVESFMSRPEIRVIKKTKKSEREIDIRPLIYKMVVEENGKIFMQVAAGSATNLKPELVMQTLCRLENLEENDYAWLVTRCDMYADKGNEQTGRQLVSLEDFAEMKKLALSDDILLKIEKPARYLGNEVNHVVKDPEGKIRFAMCFPDVYEIGMSHLGIQILYDLLNAREDVYCERVYSPWMDLDEVMRKKQIPLFALESQDPIKDFDFLGITIQYEMCYTNILQVLDLSGIPMLAADRGEDDPIVIGGGPCAYNPEPLADFFDIFYIGEGETVYDALMDAYKANKAAGGSREQFLEMAAAIPGLYVPAFYDVAYNEDGTIASFGPNRSCAPAIIDKQVVTDLSSVRYPEKPLVPFIKVTQDRVVLEIQRGCIRGCRFCQAGMVYRPNRERELDYLKEHADKMLNATGHDEISLSSLSSSDYSELEALTDYLIQTCENRKVNISLPSLRIDAFSLDVMSKVQDVRKSSLTFAPEAGSQRMRDVINKGLTEEVILKGAADAFAGGWNRVKLYFMLGLPTETEEDIAGIADLANKVAKTFYEIPKGERPGNGRVDVVASTSFFVPKPFTPFQWVRQCTDEEFVAKQKFLSAKMKEQINHKSMRYNWHEFELTKLEGIFARGDRRLGKVLMAAYRNGCIFDSWSEFFNYEGWMKAFEDCHVDYTFYVHRERPLDEILPWDFINAGVTKEFLKREYQRAKEGVVTPNCRQGCSGCGCRVYEGGVCYEAMDNYFEMEAAQKSNYRRLRQLDKKQKHSIVRDSTEKSSSFSMRMIIVLLILSVTMFLKQTDVLSGNRVYASAMAEIQRQTDVEQLKEKIETTIVTPVVNQLNSRHIGENAHNMVHAIIFDMDGVLIDSQPMHYLGDQQTLAAHGVDVPVEAMTAYAGTTNQLRFELFKERYHLSETIDSLIAEREAIMIRLVRESDAGPTAGSVELLKSIKAAGLKTAVASSSSYPFIHAVLEKLGIVAYFDLIFSGEEVKNGKPAPDVFLETCEKLKETPETCVVIEDSANGVLAAVRAGMTCLGYQNPTSGEQDLSKANVVIDDFRTIDADFLIHLSEKNDIVHMGVLEGLKPERVFYYFEEICKIPHGSYNVAAISDYCVSVAQSLNLEVRQDEEYNVVIRKPASEGYGEAPVLMLQGHLDMVCVKDAGVDFDFEKDGLNLVVEDGYVHAKGTTLGGDDGIAVAMGLAILEDNTIEHPELEVVFTTEEEVGMEGAIALDTADLKAKYLLNLDSEDEGHFLAGCAGGVKATSFLPMSCASAEGTAMTLHVHGLVGGHSGSEIDKGRANANILLGRLLFELHEALPFCIISVDGGDKDNAIPVDSKAEIVVSDEDIDEIQSLAAAFQEKVRSEFHVCDPVIAIDADVRAEGGYEVFSMALTEKVIFMLMQVPNGIQTMSADLPGLVESSLNLGVLETTEEGVAMTWAIRSSVKSLKELMKDKLRYMTEFLGGEMTFRGEYPEWPFNPDSKICALCKKIYEKQTGEEASIEMIHAGLECGLLSEKMPWLDMVSMGPEMHDIHTSRERLGIASVERTYNLVLTVLKEFKNYCNMINVFEVRETNKMIEESNLDVRTITMGISLLDCCDNNVDVVCEKIYRKITEKAANLVKVGEQIELDYGIPIVNKRISVTPIALVGGSCCKTPEDYVKIAKTLDRAAHTVGINFLGGYSALVSKGMTPADKLLIESIPQALAETELVCSSVNVGSTKTGIDMDAVKMLGETVKKTAELTKDNDSLGCAKLVIFCNAPDDNPFMAGAFHGVTEGDVVINVGVSGPGVVKRAIEEVKGQDFGVLCETIKKTAFKVTRVGQLVAQEASRRLNVPFGIIDLSLAPTPAVGDSVAEILQEMGLERVGAPGTTAALALLNDQVKKGGIMASSYVGGLSGAFIPVSEDQGMIDSVLEGALTMEKLEAMTCVCSVGLDMIAIPGDTKATTISGMIADEMAIGMINQKTTAVRLIPVHGMKVGDTAEFGGLLGYAPIMKVNEFDCSDFINRGGRIPAPIHSFKNMNRTIITVIGKDRVGIIATVCTYLAEHKINILDIDQSIIQGYFHMMMIVDANGADKEFASLVKDLEKIGEDLGVQIKMQHEEIFDIMHRIMQFSTIASGSSGNCLYAANDDTHILIDAGISKKRIEQGLKSFGTEGTDIDALLVTHEHMDHIQGIGVWSRKYHVPIYGTRGTLEEIWRTKSLGKVDESLFHVIRPGETFQINDMTIHPFSIPHDARDPVSYQIETADARIGTVTDLGYFDEAIIDELKDCDLLYVEANYDLHMLEVGPYPYQLKRRIAGNYGHLCNEMSGQLVGRLLNERLQQVILGHLSKENNFPELALRAVQNELERDFSVTKEALHISVAPRDEARALITLMKVYGITGGAGTGKSEVIKMLQQNFGGCVIMSDEVARELMQKGNISYQLIVEYFGRDILMDDGEIDRKKLADHVFNNKEALEKLNSMTHPYVKDEIRKLIAEAEASGECRFVALESAILLECGYEDICDEFWYVYTKPEIRRQRMKETRNYSDEKVDSVMRNQQPDEAFFEQCSFVIKNNTTLSDVYAQLKEKLDQQMSKVILIDGHSILNRAYYGIPLLSNAEGLHTNAVYGFLNIMFKILDEEKADYLAVAFDVHAPTFRHEMFEAYKGTRKPMPEELREQVPVIKEVLHAMQIPTLEHAGYEADDILGTLGKAYEAAGYDVSIISGDRDLLQLATDKIKIRIPKTKMSGTEIEDYYAADVFEKYQVTPTEFIDMKALMGDTSDNIPGVPGIGEKTASKIISTWHSIEAAHAHAAELKPKKASENLVTYYEQAQFSKVLATIKTDCVLDFKLEDAAIGQMMNDASYALLKRLELKNILKRFDSVAETTVNYQTVKVLDDFAAAVSWLEGIGETDQLGLYYFSEDDFEGLAACKADNMPVYIPAEGMMTAAVLREMAAAAAKRAGVCCMIDVKPQLYWLELSEEDGIFDAAIAAYLINPLKDSYTYDGIAQDFLGMTVPSRADWMKKMTLTEASEKEKESFGHYLAYSAMIPVQAYSTLKKRLEETGMDRLFDEIEMPLVYALYDMEKAGIAVEKDALAEYGSRLTGRIDELEKNIYELAGESFNINSPKQLGIILFEKLGLPFAKKTKTGYSTSADILEKLRTYDPIVGQILEYRQLTKLKSTYADGLAGYIRPDDQRIHGKFNQTITATGRISSTEPNLQNIPVRMELGRLIRKVFVPKEDCIFVNADYSQIELRVLAHMAGDEHLIQAYKEAQDIHRMTASQVFHTPFDEVTPAQRSNAKAVNFGIVYGISSFGLSQDLSITKKEAENYIQQYFRTYPGIKAFLDRSVEDAKEKGYAVTLFGRRRPVPELLSSNFMQRSFGERIAMNSPIQGTAADIIKIAMVRVNRRLKRQHMKSRLILQIHDELLIEAVLDEVDAVKAILKEEMEHAVTLAVPLEIDMHTGHNWYELKMKCHDVQRMISGFIEEKLTDEQLEGFLEHIENCQDCYDELEVYYMITIGLMQLDEDHTGTMDLKKNLKDFISEQNKELYMRKRLAARRHFAKRAGIVIMAVILAFCSHTLLFSEQEIHTLNDFKDAAAASLYAFWFGKDAVTEDMGDISETSDVSSGRLYFEQHYPVILPAGFSVEQRGLPDGGNMIEKELIVKMIDGFNRTIDYIRLSVTDRCNLRCRYCMPPDGISCLPMREILTYEEIEHLCRIFADLGIHKVKITGGEPFVRKNICHLIRRIKQIPGIDSVTLTTNGTLALQHLEELKAIGIDGINFSLDTLKPAVFHQITGESGLENVLAAINKAVSLQIPNIKINCVPVRDFNLSEIPDIAALAEDYPIHVRFIEMMPIGLGKDFQMISEAEVCHLLKDTYGSLEPIDGIFGNGPAHYYHIPRFKGHIGFISAMSHMFCDGCNRIRLTTDGQLKTCLFYENGIDLKSLIRNNCSDEELRQQVCLALQNKPQHHEMSSLPPELRGMSQIGGMYNVAIITASDKGYAGEREDKSGQTIEELVTAKGLHVAHKIILPDDRSMLAKQMMTLCDQNIDLILTTGGTGFSKRDVTPEATADVVERRADNLTFAMIANSLQYTPKAMLSRGIAGIRGNTLIVNLPGSPKAVRENLEYAMDAIIHGVKILKGDDGECARQMKEQVLNEIVKFDSTAEYYQQLEKSILGNQSCYEATVVDGELLGMKVLVEGKHPVGLYLPNATDERRQKAEQMILDYVADPDYFERYMSIGPTANDHFVFMEKVGSGKQMVICGAGHVSIALLRLAKMVGFKVTVIDDRPVFCNKAREAGADEVICEPFRQALERMDDHQEPYFIIVTRGHQYDVDCMHVILGKRHSYIGMMGSKVRVKNLKAGLLEEGYDAALLDSVHMPIGLKIGAMTPEEIAVSIIAEVIECRRTQKEKYCYSSEMQQMLSQPEEGVRMALATIIVKKGCGPREAGTKMIILEDGRIIGTIGGGCAEAEVISKARYCIRENICLMEHVDMTGREAAENGLVCGGVMDILIQPLSMKQSRRIAGSILVGALCFAMAMPAFADSKSDVSSQINSLEGQASELESELASMKANKTSIESYIAELDTKIKETLSALDTVSDEIEQTDQEIKTTKANLKEAEANQEIQYEALKARIKAIYESEEDASFFKVLLKDADLKSVLNSQEYKSRINMYDYELYNSLEATTKQIQAYEQELGEKQDSLTKDKDSYEQQMSELDTILDERQNELSSLDDSMRAAYSDISDIQSQIDAQNSKMASILAEEKAAAKAKAEHEAAVKQEASKNTDTKKSDSSTKKTDTSTKKNTESTKTETSAPETKTPETSAPETKVPETEAPSNDNSYVSDGKVLSKYHGVVYGPTGKETYYNLDMSGVVRIMRDMGFSAEDYPYWVRDDGCKMLGSYIMCAANLNYFPRGTTVASSLGTCLVCDTGSFAASNPTQLDIATNWMDDKNPMIDKMQKATTELFVLSALMTEDIYPYRLTKDIKAMTFGLIEYSEAGLYPVISRLLNAQMISSYTVALENGRNRTYYHIEDKGRAHWRLLKNGYDQFIRISYLITEKNGDMIGFNLTEEQKEMQAFFRKFSQERVKAAAEKMDEEEKMDMDLIHEMQSLGMFGIPFSEEVGGAGLDVFNYVLLMEELSKVDASTSITVSVHTSLCASSIEEFATPEQKEKWLRPLADGSKIGCFGLTEPDAGSDVAGARTVAVKDGDEYVINGSKIFTTNSGFADTFLVFALTDKAAGPHKGMSAFLIDRNTPGITVQPDIKRMGIRGASNSEVVYTDVRVPASDLLGGEGKGFKIAMKALDGGRIGIAAQSVGLAQGALDEAIAYCKERKQFGKPITAFQNTQFRIAELQARIDAARLLTWRAAVAKDNGEPYNVYAAEAKLVASDVANDVCRAAVQFMGGYGYCREYGVERKLRDVKITEIYEGTSEVMKMVISGSLLRMTDRNQEDLRYMQMALDMAKLGRGYTNPNPMVGAVIVKDGQVIAKGYHHCCGQGHAEVEAFKDAGNQDVTGATIYVTLEPCSHYGKTPPCADKIIEKKIGRVVVGALDPNPLVAGRGIEKIRNAGIEVTTGVLAEESIKLNEIFMKYIVNKEPFVLYKSAMSLDGKIATASGESQWISCEASRKEVHELRHQYMAIMVGSQTVLDDDPMLNCRLIEGKDPIRVVVDSSLRIPMTARLVKTARDIRTIVACTPTADEKKIKDLQNAGVEVLIIEAKDGHVDLKKLTEELGRMQIDSILLEGGAALAAAAFGAGIIDKVQMYIAPKIIGGKTSRTPVGGKGVEHLSDAWQLEDITARNIGNDICITGYIRREAMFTGIIEEIGIVKQLVPGKVSYRLTVSANKVLEGTQVGDSIATNGICLTVTAIHGNNFDADVMAETVRRTNFSSLHAGSRVNLERALTPMSRLGGHIVSGHIDGTGTISDMTREDNAVWVTVQTKPDLLKYMIEKGSIAIDGVSLTIAYVDDGCFKVSVIPHTGEETILLKKKPGDTVNLECDLIGKYVEKLLFGKAEETQKSSGGITEAFLAENGFMMKEFNSVEEVIEAVRGGKIVVVMDDEDRENEGDVICAAEFATPENVNFMASYAKGLICMPMHVDYVEKLGLDMMCSVNTDNHGTAFTESIDYKDTTTGISAFERSMTAMKVVEDGAKPEDFRRPGHMFPLVAKKGGIFERPGHTEVTVDLMEMAGLKKVGLCCEIMKDDGTMARRDDLMAFAEEHDLKICTIAQIKRYRKEHEKLVECVAKAKLPTKYGDFMMYGYINKLNGEHHVALVKGEIGDGKAVLCRVHSECLTGDAFGSQKCDCGEQLQTALRMIEKEGRGVLLYLRQEGRGIGLINKIKAYALQDQGYDTIQANIMLGFPADMRDYTIGSQILEDLGVHELRLMTNNPEKIDGIAAFDLKIIERVPIQMELGKNDAFYLLTKKEKMGHLLTYPVTLEEEENAKKDNKDNKMNVLEGKLVAEGMKIGIVCARFNEFITSKLLGGAMDALVRHGVADSDVDVAWVPGAFEIPLAAQKMAATGKYDAILCLGAVIKGSTSHYDYVCAEVSKGIATVSLSSGLPVLFGVLTTDNIEQAIERAGTKAGNKGYDVAVSAIEMVNLFKNLMTGIFCIQSAYEKKKNDQNCCSICKEKLKKRKVNKDPGVSLAKASMAVLRKMLMASLSLRNIYKVYPNGFNAVKDFNLEIEDKEFIIFVGPSGCGKSTTLRMIAGLEEISKGELYIDDKLVNDVEPKDRDIAMVFQSYALYPHMSIYDNMAFGLKLRKMPKDEIDRRVREAARILDIEHLLDRKPKLLSGGQRQRVAMGRAIVREPKVFLMDEPLSNLDAKLRVQMRIEISKLHQRLQSTIIYVTHDQTEAMTLGTRIVVMKDGVIQQVDSPQNLYDRPDNLFVAGFIGSPQMNFIDATVVKEGGELFLEYGEHHRVILPPEKAAKLTDYIGKEVTFGIRPEDVFAADKYEAAHEHNTVEASVRVFEMLGAEVFLYLTVDGFDVTCREHPSTKAKPGDIMNISFDVNKIHVFDKETQMTITNMAYNQMLQSTIEGVKSIARTDLCLMDTEGNVIAATNEEAQQYKESVLTFVDSPAEIQVVQGYQYFKILDGTTVEYVMLIRGDSDDIYTIGKLVAFQIQNLLSAYKEKYDKENFIKNVLLDNMLLVDIYNKAKKLHIDAEERRLVFVIETNRQRDNHAMEVVKSLFTGRHGDYITAVDEENIILVKGLDLQETYDEMQTLAKTIVDLLNTEAMINARIAYGTIVHNIKDISRSYNEAKMALDVGKIFYDEKSVIAYNKLGIGRLIYQLPIPLCKMFIDEIFPGTTPDEFDEETLLTIRKFFDNSLNVSETARQLYIHRNTLVYRLDKVNKATGLDLRVFEDAITFEIALMVVRYMHYMENKIYMNSKWIKRLGVLLLLLLLVFQTAACQKTAGQGDTEEDGTASSYIFTMGTVFDIRVFAEDASDIMQEAEQALYGCDSLLSWREEGSLAYRFNTEHQADMSEMKEVFEDALQVSKDSQGAFDLTVLPLSQLWNFDKLGDSDFDVSTMKVPDKEDIAQAMAKVDYTQLKYDDATGILTTDNPDIQIELGAIGKGYAIEQAKDVLKRSDASGGMVSAGSSIYVCGTKKDGSRFRVALRDPRGDENSAIGVLTLSDTTISTSGDYERYFEKDGVRYHHILDPRTGYPADSGLMQVTIICDDSVIGDALSTACFVLGLDEGMNLAAKYGVNAIFVDTDKNIWYNNPDVLNYFEFTGKDSGYVLNEYNQARSMAKQSSGLLGSLGFVKSPGAPVPHRKHTSACQTVEMPVPATVTIVMSQHIGAPCTPCVKAKDQVFVGTLVGESTAFMSAPIHSSVSGTVKKIDTVLMPNGTKAQAIVIDTDGEQTVDPAIQPPVVNSKEEFIEAVKQSGLVGLGGAGFPAHIKLNPKDKIEYLCINAAECEPYITADVREIMENHENVLYGISQVMKYVGIDKALIGIEDNKPEAIKLMQEKTAQMSNVEVVSLPSRYPQGAEKVLIEQCTGRQVPPGKLPSDVGCIVMNVASAGFLGGYLKNGIPLTTKRVTVDGSAITEAKNVRVPIGAPIKDIIAFCGGYKGTPAKLISGGPMMGTALMTDDFPVLKQNNAFLAFDEAEAKSLEPTACISCGRCVNACPMNLMPTKLEAATIYKRVDDLKKYSVMTCMECGCCAFVCPANRKLVQSMRIGKAILRNAGKMDGKLIVSSSPHISSPVKTKNIMLDVIIALIPSLIASIYFFGPRAAVVVIASVATCVIAEYICRKVMKREQTIGDLSAVVTGILLAFNLPSSVPIYVPIIGGLVAIVMVKQMFGGLGQNFVNPALLARIILMNSFPVLMTTWYPSGNFGADTTAMASPLANIAAGNVDALPSYWDMFIGNIPGCLGETSALALLIGGIYLIARKVISPIIPVTYIGTVFVLSAILGQDPVAQILCGGLFIGAIFMATDYVTSPLTNKGKFIYALCCGIITCLIRVFASLPEGVSYSIVLMNIIVPLIERATVPKPFGTVKEAKMNFKSIGIPTIKLLVIAAVITILLFLTNNTTEAKIAQNQADANVASRKEVLPDADDFDEKTVTVDGVEYTYYEAKNGAGYVFSGSNKGYGGAVVSMVGISSDGKVVGVKVTEASDETPGLGAKWIAADASGNERRAQFVGDIPESGSFAVVKDGGTIEAVAGATITSRAVTHDVNDAIAQYNAVVGGANMAKKEKSYGEILTAGFIKENPVLRLVLGTCPTLAVTTQAFNGLGMGAAATLVLIGSNAVISLLRNVIPDKVRIPAFITIIAGFVTIIQMLVKAFVPALDSALGIYLPLIVVNCIILGRAESFASKNKVLPSILDGLGMGIGFTIALVLMGSIREIIGNGSWFGMVLNDGSMIQPMLILILPPGGFFVFGMLIALFNRLAEGKGKEPATLSCCNCPQAASCMKASEGGCEMSITGLLSIFLAAILTNNYILSKFLGICPFLGVSKKLDTAVSMSAAVIVVMVVATAVTWPIQTLLLDPLGLGYLQTIVFILIIAALVQFIETFMKKNMPPLYQALGVYLPLITTNCAVLGVTTLNISSGYNYIESLINSFGSGVGFLVAMVLFAGVRGRLETADIPKSLQGLPITLVSASIVACSFLGFGGLVDGIFKMYGIILVAVIAIIAGLLLSWASIQFAVPVDEKQAAVREVLPGANCGACGFSGCDGYAAALAAGTAEIGLCSPGGPDVAEECATILGKAAGEMVRKVALVQCNGTCSNAGQKLIYDGVDTCQAVSLMFAGDSTCAYGCLGHGDCAAVCPEKAIIVHDGLAMIDQDKCVGCGICVKTCPKHVIALVPFEKKHHVLCVNTDKGAEAMKVCKTSCIGCMKCVKTCEHDAIHVTNFNAAIDYDKCTNCGACAEVCPKHAICMEQQTILIVDDDREIVRVIAKILELEGYRTLKAYDGLEALDMLVGNVVHLIMIDIMMPKMNGLAAVMKIRETNNIPIIILSAKTEETDKVLGLSMGADDYISKPFNTQEMIARVKAQLRRYMRLGAMNSESMQDSIRIGDLYLDKHAKELNVNGESVHLTATEYKIMELLMSNPGRVFPAEEIYERVWQEPAYSVENTVMVHIRRIREKIEINPKQPKYLKVVWGIGYKIEKDDSKYMGKLLFLVLVLPEAFVAVSCYAIFIRRMKDREKRRGLWIQSVFPKHEKKQKVKKENPIRKLYTKFRESVVSLKAEYEHSLNYEKKQLICTILIVGGNLFIIWAVLFANSGILVLILLIINIVYFIRQRGFYRNVGEIIRELHHLSMGEEVRPVNISETSPLYEAGCDLEKVNESLDKSVKRQVKSEQMKIELITNVSHDLKTPLTSIIGYIDLLKKEDMSPEAQDYVNVISQKSEHLKEMIQDLFEISKATSGNAELVLEKLDMVKLLQQTLGDMEDRISSSGRIIRTVLPEEPLYISGDGKRLYRVYQNLMENALKYSMEGTRIYVEGRVEEQKVITEIKNIAAYEMDFTADKIVERFQRGDVNRTTEGHGLGLAIAKSFSEACGGHLDIIIDGDMFKAVISYPLYWENMDTGERAYEKIINYVEQQVMQGRYKKGDKLPPERELAALLGASRNSVREGLGILERMGAISSQQGAGNFISDNFEKTLVEVMTLMFILEEGTFREISEFRYALETQALALAMEHISKKQLADIEYYMSMLEKTPEEDMKAYYDKKIHYTITAASGNRFIIDNLQALTAVMDVFIRDMRAKILSDGSNSEGLMAAHREMVEALREKNMEKGMQALKVHFEYIYEYIDGMSEYSKVTPEIVEQIKAVVAPNRVYTGADINEDFSHDEMSIYGKAMPELVVDAVSTEEIAATMKIAYDNNIPVTARGAGTGLVGACVPIAGGIVINTTKMNKILEYDLNNFVVKVQCGVLLNDLAEDCVSKGLMYPPDPGEKFATLGGNVSTNAGGMRACKYGATRDYVRAMEVVLPTGEVTRFGSTVSKTSSGYSLLNLMIGSEGTLGIITELTLKVIPAPKEVISLVIPFETLEDCIGTVPQFKKNGLDPQALEFMEKAIVQASERYIGKSVYPQKIDGVEAGAYLLVTFDGKTKDELDNIIEEASEIALEAGAIDVLVADTPAKIKDAWAARSSFLEAIKAETNWKDGLEMLDECDVVVPLDKIAPYVEYVYGVGEKFGLRIESFGHAGDGNLHIYIIGDDKISVADFKAKADEFFDDIYAEATRVGGLVSGEHAIGSGKLDYLAKSVGPTQMKLMEDIKRVFDPKMILNPGKVCYKLMNFHFNEEEQEILDMLHDYAVKEVAPRAHEIDEEEKFPMEARNGLAEMGMMGMYFPEEYGGAGLSYLSYIAVCEELAVHCATTSVVLSAHESLCSWPIYKYGTEEQKKKYLTALASGEKLGAFGLTEPGAGTDAAMQKTVAKDEGDHWVLNGSKVFITNAQYADIFVVFAMVYRPDYKENPYTNHDISAFIIEKGFEGFSVQGHEMKMGIRGSSTCSLYFDNCIVPKENLLGQQGKGFKVAMTTLDGGRIGIAAQAVGIAQGAINETVAYTKERVQFGKPIWKFQNTQFQLADMQAKVDAARLLVYRAAQAKQDGEPHSHLAAMAKLVASETASDVARRCVQLVGGNGYSREYPFERHMRDAKITEIYEGTSEVQRMVIAGWLGATKMEILVLIKQVPDDSVEIKLDPATGAPKLDGVEAVVNAFDTYALEMAKRYIEDNGGNVTVATIGDDDATAALRTCLAVGAGKAFLIKDASFAGSDTTAKAYILSKAVAKIEEINGAKFDIVFCGKEATDFSKGMVGVQLASELGVGVATDVIAVDPAEGGVTVKQETETGYNVIEMTTPCVVTIQKPDYDPRYPTIKTKMAARKATINEVTAADLAVDAAKIGEAGSLTKVLKLYEPPKKQAGVKIQEETVADSTMRALAMIAEAKVLMDFAEYKDILVVLELDEGKPVNVSLENIAAAKSVVNGGKVIAVTVCENAAKTAIEYGADSAIVIEGAQFEGYNADAVADAVAQIAAEVKPAAIFTGATGKGKDLVPRIAAKLATGSVCDATAVKLDEAGNVVFTVPAYGGNILTDVVIDSVRPQVASIRGGSVAKLEPEAGKAGDIAKKAITVADDQIKLQIKETVKEIAESVNLEEAEVIVAGGRGMGSKENFDKLQELADILGGVVGCTRPAMESGWISRAHQVGQSGKIVAPKVYFAFGISGATQHVSGMIGSGYIVAVNKDEDAPIFDVADVGIVGGAMDVLDIMIEEFKKNKMKERMQRFMAGRYGNDQLNQFIFIVAIISMVLEIITRQSLFYTLTLVLLILAYVRVFSRNINKRYEENMKFLQKKDAILNKFRKQKYYAAQRRNFHIYTCPQCKQKIRIPKGKGKISITCPKCRTSFIKKSMVERKVKVAIPCGIHIRPAGIISHTANGFKADSRIIFGYHVINTASILNLVASGIHCGDIVSVECEGPDEQAALDGITSVLEDSTIQQMLEKIKALLAEELGVNAEEITAETSFKEDLGADSLDLFELVTNLEEEYNIEIPAEQLEEMTTVGKVIDYLKSIHIEAMNLKHLSYFVDISKRESFTKAADDIYVSQSALSKSVKSLEQELNVTLIDRTSKSFNLTEEGKILFSEGEKLLQYIDESQNEIIEKICKSRRRLRIGVPPVASTVYFSHLLYRFMKKYPDIDLKMSEVGANIVQTQVNSGSIDIGIVVLPMLNTENYNVIPAMTADNALIVNKDHPLASREEVSFKELEHEDFLILDGTYMLHDSIIRNCEIAGFYPHITTESSQWDFLAEMVAYNQGISILPVPIMKRFSSSEKIKMIRLKEPELPWNIGMIFKKDKLITEQMKVFIQFVLDNKDNVKDYTMHSTFLFEGRQRTVHVTQTGHMPAVLVLSGGKECICSSITVYALYGMFYAYKMGQAVVVLKKGEGRTLKAGGMWVYDNEIASVTGSYEDGDMVIVRDFDGFPMGRGFINRHSKIRVRLMTRHIEQEIDREFLKERLQAAWDYRKKVTDVSSCRLVFGEADFLPGLVVDKFSDVLVVQVTALGMDRMKLEIVDLLKEILVADGIEIKGVYERSDGKYRDQEGMERIKDFIGEPFDTDVPIMENGVRYIVDVKDGQKTGFFLDQKYNRLAIQKLCRGARVLDCFTHTGSFALNAGIAGAAEVTGVDASELAVHQAEENAALNQLQDTVHFQCVDVFNLLPELEKQGEKYDVVILDPPAFTKSRNSVKHAMKGYREINMRGMKLVKDGGFLATCSCSHFMTYELFTEMLHQAARSVHKRLRQIEYRTQAADHPILWSADESYYLKFYIFQVVDEKMNYEEAISYIEKVSCNGIMPGLVRIQALLEKTGHPEMDCNVIHVAGTNGKGSVCTYIASILMQAGYKVGRYVSPTLFDYRERIQVNGKWISRKDTAYWMSRVREVDERMQSEGIEGASAFELETVMAFLYFKAMACDFVVLETGMGGRLDATNVVPKPVLSVVTSIGMDHMHFLGNTIEAIAVEKGGIIKEKRPVVIGAGRQKAVDTLIRISLERQSEYAVVGAEDVHMTYADLFGGQQFDFESYKELQTRMVGRCQPWNAAIAVKAVEMLGKMTATDCPVQLDVLPKDVLSEQVVRKGIASAYWQGRFEVMEKNPSLIIDGAHNPDGVQSLVDSMKAYLSDKPVILVMGVFADKDYRQMLEMVSDCSDTLIAFKPDNPRGLAAEQLKETAEPFFKRTLAAKSQAEALAIARKIGEGNHAIVCFGSLSTMAGWYQLTGRKFSDEEYRQNYMKNIDRIINHPLFIMSMKKIHDYEIDRVFCCHGIEHSLDVARVAYITNLEQNLGFQKEMIYAAALLHDIGRWRQYEKNIPHEEAGAALAADILEDTAFSKEAIGQILAAIGSHREKMEMETDRFAYLLYESDKKSRICWLCEAQDTCYWPETQKNRTVSNMQIGNKIFDTEHHTAVMAILNVTPDSFSDGGSYKNMDDIRRRVSQMIEEGAEIIDIGGESTRPGHIQISDEEEICRVAPVVACLKKEFDIPLSVDTYKSAVAEAAIQAGCDLINDIWGLQYDEKMAGLIADAGVSCCLMHNREKVDYRDFLPDCMADMRKIIETAKVAGIAEDKMILDPGVGFGKTLEQNLMVMKHLNDFNQFGYPVLLGTSRKSMIGLTLDLPVDQRVEGTITTSVWAVQAHYGFVRVHDVAANYRAVRMAEAIMNAQMDKICIRRLEVYAHHGVYEEEKRLGQKFYITVEMELDTRAAGISDDLQASVNYGEVCLGIVEWTKSHRRKLIEAAAEDIAHYLLVQYPMVRKVTVELEKPGAPVPYAFDTVLVHIERSRHQAFLGIGSNLGDRQMNLAAAIRLLEAVPDLQVTKRSPLYETAPYGYTDQPPFLNGCIGIETLYTPEELLRVLHEIEHKLGRKREIHWGPRTLDLDILFYDDLILDTPDLHIPHADMANREFVLQPLSDIAGDFRHPVINETVNALLAALKKQSNMDLGVLRDQIDDIDKQIIRLFEERMDVAEQVARYKIGCGKPVYDPVRERSKIERAKDMATSSFNARGVETLFNQLMAISRVRQYELVAEAHQDNFGFEECNGDHAGAKVAFQGVEGAYGHQATLGYFGKDVDCYHVKTFEDVMKEVHEGRADYGVLPVENSSTGIITDVYDLMHLYDNYIVGEYVVKVEHALLGLPGTEIDQIKTVYSHPQGLLQCSSFLDEKPEWEQVSLQNTAVSAKKVLVEQDRTQAAIASPAAAAIYSLSVLKEKISDNDNNSTRFIIIRHKKEYVKGADGISISFELANAHETGSLYHALGFIIYNSLNMTKIESRPIQGDKWRYRFFIDFDGNIGEAPVQDALRGMAQETINFKILGNYIQVEMTYKTFAAINVGSGEVSMKIYEISPKTGIREIDYVRYYIELGSDTYTKGYIEYDLVRELCDVLEGFSTKMEEYRVDSYLALGSSALIEASNCELIVDQIRVRTGLKVETIDNAQQRFLLLKSVARGMRNFEQLIDDGAAIVDMGSGSLQITIYDEGRLIYTQNLKLGSLRIREILADLEGQTDNFVNVMEDYIGNYIDTFSRLFMHERKVRHIIAVGEEMESIVKIIGSDGRKNYMERHAFDAVCGSVLAAGEEELSAKYSIPYELATVLKPAIIVYKKIIEISGAEKIWAAGCDLCDGMIVDYAERQEQIEPAHYFAEDIISYARTVAARYESNKEHTENVEKTALAIFDGIKKRAGLDQRDGILLQMACILHDCGKYVNMLGGTDYSCAIVRATEFVGLSEQEKSIIADTIKYNAWHYVPKLSELKAPLNRKNYIRMLKLAAILRLANGMDRSHRQKIRKVTTTFKEKELIIRADTIYDITLEQSTIENKSHFFEEIYGFKPVLRMKRRMSNQFEQPENYRNRELSWLEFDYRVLSEARDKSLPLFERLKFLSITASNLDEFFMIRVASLKDMVHAGYTKPDIAGMKPQEQLKHISKKTHELVGVQYSTYNRSFLPALRQNHMVIIDQFEDLSPKQAEFVDEYFMRDVYPVLTPMAVDSSRPFPLIRNKTLNIGALIRDEQQKGEYDFATVQVPNVLPRIVMIPSENDEDTTVILLEQIIEKNIQKLFLNYEVICAHPYRIMRNADLSIDEEDAADLLKEIQRQLKMRQWGEVIRLEAEENMDRRLLKILKKELDVAEEAIYRIGGPLDLTFLMKVSGFEGFDHLRYSKYTPQPVKGMNTEEDIFTQIRRKDILLHHPYQTFTPVIEFVRQAAKDPDVLAIKQTLYRVSGNSPIIASLAAAAENGKQVTVLVELKARFDEENNILWAKMLEKAGCHVIYGLRGLKTHSKITLVVRRDEDGIRRYVHLGTGNYNDQTAKLYTDMGLLTCSKPIGEDATAVFNMLSGYSEPPYWNKLVVAPIWLRDRFLKLIDRETEHARQGKPARIIAKMNSLCDKKIIAALYEASCAGVEIQLIIRGICCLKAGIPGLSENIHVRSIVGNFLEHSRIFYCYNDGWEDIYMGSADWMPRNLDKRVEIMFPVEDEECKKAVKHILSVQLADNVKAHILQLDGSYSKIDKRGKVLVNSQEYFCKEAVGEAKGMEEESVQIRRVFEPLLHVDEMNAYGTLLKKLIRFTNIKLTNLAEIVGYDTSYISKWCNKGKLPAAKAAPNVNKCLADVFAREIIIQEEATLFAAEFNASGPYDESSLSSTIFQLLKDAYKRSYDNTSENAQLAGLSSQRMLLWQLDIKNFFVTELPQLLHQLNEPCQILCTMDICGFLKDLSYETGRQAYYTNPVHIKMGINLGGHCKNNSYIPQLYYFLNHYNDISFDFYENTCMDYMNLFIVKNCIAVQCALDKDYRISIAHIITDTAQVNSLYQKVNSEFTLSRLMIHSSDSEELFYNGYRTEFYAHNTFQIMVTKGFEFLLPPEINPRLIQAARDQGFDESMAQLVAHLGITWEEIFEKGAIDFYLLKTNLIRYITDGTIYFADVVYHMSVEERKKHIQHVLDLVQKNPNIRFFIIDDECIPNSEHLFQMSVYNNKRKLFLKNMEHYDARTHLGPSFYTMQNETLIGGISQYFSELQSSSLCNVYGSEDVFRFYEKYGIMIDRMLSIEEMDNMNHLLFDFLDKHADMYEGKDAINPELYDLYKVKRGLRDKNGNGVVAGLTTISTIEAFDISGDQKVPCDGRLYYRGYDVRELVSGTVREKRFGFEEAAYLLMFGCLPDRRELKQFCDVLGSMRTLPTNFVRDVIMKAPSRDIMNSLMKSILTLASYDSRVNDLSEVNVLRQCMMLISEVPMMAVYGYHAYNHYECEESMYIHRPSPELSTAENILMMLRPDKKYTELEARVLDVALMLHMEHGGGNNSTFTTHVVTSSGSDTYSVMAAALASLKGPKHGGANIKVMEMMDDLRANVSDTKDEEKIRNYLDQLVDKQAFDKKGLIYGMGHAVYSLSDPRAVVFKSFVESLAKEKGRMDDYHLYTTIERLAPEVIAEKRKIYKGVSANVDFYSGFVYSMLGIPVELYTPIFAMARVVGWSAHRMEELVNADKIIRPAYKSVAEKRIYQPIDKRQERELAGGNYRKIEEKMFVLFFLFWVMLNGRITVEITLFGLVISAAMYVFVCKFTEFSFRKDMWIVRKLPWIIGYCFILINEIIKANLTMIHYLLSPQILPEPALVRFHTDLKTRTAQVLLANSITLTPGTITVEMKDGEYLIHCYDKTMGEGLDSSVFVSMLKKLEEMDAAFKSFFLVCIIVLAVLTFFCLVRTIKGPRLVDRIVGTNMIGTMTIAVIALLAAYLNESSILDICLIYAIMSFVAVIVLTKIYIGIYNEKKSRQSRIEEESQDEYMNISLIRFIIAAVLIMIGILIMVIQTFGVFKLSYALNRMHAAAMGDSLGIMMIVLGMMVIYGISFASLKLLTVLVVFWFASPVCSHLLAKLEVSTNEQIEDECEVPKEMTGLRILLLVLLIICTIAVSFSKNLLVSVVIYMAFSLVMSIIWLILESPDLAITEAAVGAGVTSILFFVTLKKIRSIRTTAEEDIDEMSKKNPNYRNSFADKFTRWVKGDYDPIVGQMEMNAPDKEVFGDERIRYVHLHIVKSNNYSERMFEEGLAKNVRRFTGLYKVFGAIVAIFIACLLLWTVSYLPKFGDPNAPENNEVATRYIEQGLSETGAVNIVTGMILDYRAFDTFGESCVLFVASCCVLILLRVDKDEDPESRAIEDMNDRHYEPRNDTILQKVANFLVPLMIIFGIYVVLNGHISPGGGFSGGAIIGSGLILYLTAYGFEKTQRFMNEKVVKALTVGALTFYCFAKSYSFYTGANHLHSIITPGTPGNILSAGLIVYLNICVGIVVACTMYSFYTLFRKGGIMGSFATNYEEIAAVLLFVIGMSNLVFQPNLLKKIIGLDIMDSAVYLFLAAKGYIEGRTAPIVVDGILDASHYINPVPAGLVLTGIVVSVSVSALMMALTVCLYREYHTLNIDEIMMKLRKEEDMAFVQNFPFFCIILSMFSAIISFVMNGRVAKYIHVAMVTAVLILSLATLSFVVGTGESYTFMMGHFPAPWGNEIRIGELEALMAVFFSLIMMLSVFGGMAHIDREVQDSKKNLFYILLDLLMASLLALIYTNDLFTAYVFIEINTIAACGLIMIKKQGRTYVSALRYMIMSLVGSGLFLIGLTLLYSITGHLLMSPAKEVLEQIVAVHNYQVPLMVIIILVTVGLGIKSGLYPFHTWIPDAYGYTTPSASAVLSSLVSKGYIFLLIKIFYRVLDFDSVISSHMVNILFAFGVVGMIMGSVAAIKEKNIRRMTAYSSVAQIGYIYMGIGLGTTAGVVAALFHIISHGAMKSLLFISISGLTEVSDGRSDYLSLRGAGLRNKVAGAAFTVGSLSMIGMPLLTGFVSKYLFAAAATTAGSKMITAWVVLAISTVLNTMYFMRTVLTLYRPVPEETHKAYTVEKSRIETAAIIGMILLNIGLGVASQPVIKVIEAGLAMFGMDINNYFLLFPVLLPIIAGVLLMFIKFGKREHMQLYILLILVIDLASIGWIALQPEDTLTLSQFFIAEGLHVFFHVDMLSKIFSVLIAFVWLMVGIASFEYMAHEKNEQRFYCFYLVVGGVLSALAFSGNLLTMYVFYEMMTLTSMPLVMHNLSHEAIMAGLKYLFYSVAGAFMVLFGFFLFNAEGRVLYFAPGGIINEPNPSGIMLFAVFLMIIGFGTKAGMLPMHGWLPTAHPVAPAPASAVLSGVITKAGVLGIIRSVYYVAGPDMIKGTWVQYTWIILSILTIFMGSMMAYKEKVLKKRLAYSTVSQVSYILFGLSVMQPIAFVGALMHVIFHSLVKNTLFVSAGAIICKTGKTKVRQLVGIGKEMPVTMWCFTLVSLTLIGIPPTSAFVSKWYLISGALDSGIPGFSWVGPVVLLISALLTAGYLLTISIKAFFPGEDYDYTKLVNHEPTWRMLLPMVVMTALAVILGIWPAGLMKIFADIAASVLMPSYFILVPILLPVIVGILLLIFPIEDAKKRNICIEIVVVLNTILVLWLLTHRPTESFYMFSLGARLPLTLNIDGLSMFFGGLVACLWPLASLYAFEYMKHEERVNTFMAFYTITYGVTLGVAFAGNIITMYLFYECLTMVTLPLVIHTMTREARKATRQYLYYMIGGTAFAFIAIVFYSLFCNDIAFVLGGNLNLAAISNHMDIALLVYVFGFFGFGVKAAIFPFHGWLPAASVAPTPVTALLHAVAVVKSGAFAIMRLTYYCFGTEALHGTWAQVVVLIAALITITYGSTLGVRETHFKRRLAYSTISNLSYILLAVATMSPLGLIAGLSHMAVHAIMKISAFFCAGAVMHQTEKNYIYELDGLGFEMPVTFIALFISGLSLMGMPLFAGFVSKWNIVHALLEHESMMGYISVLVLLYSGLMTGIYMLTIIVRAWFPHVGYHKDLVEEFRDPNWLMKGPLVIFSVLTVVIGFYAQPLLDFIQKIAVGIYMIGNPILLLLVVGPMAAAVIGYLIGRVNKSARDYFADAVTILTFLAMAFFFLTYKEGQEVSLVVPEVCGMGLSFKLDGFRIIFASVTAFMWMMTTIFSKEYLAHARNRNRYYFFLLVTFGATMGVFLSDDLFTTFVFFEIMSLASYVCVIHDEKKETMYAGAVYLAVAVIGGMVTLMGLLMLYHAAGTLQLDALLSVCEEIFPENARWLYIAGGCILFGFGAKAGMYPLHIWLPMAHPVAPAPASALLSGIITKTGIFGVIVISSRIFLHNGYWGMVILLFGVITMMLGGILAVFSLDLKRTLACSSMSQLGFIFVGIGMQGLLGEENALAVRGTMLHMFNHSNLKLVLFMAAGVVVMNLHKLNLNDIRGFGRKKPLLLYTFLMGSLGIGGIPLFNGYVSKTLIHESIVEYIELLKEGHGAATFAFASGAGAAALFKVIEWLFIITGAMTVAYMTKLFIVLFVEKNSDPEIQKKYEAKTNYCNKVTAAVLAITATILPILGVLPTMTLDKLADMGQGFMFGVSPHHAVHYFSLVNLKGGLYSIVIGALIYVVIIRGWMMVKMKTGTVVYVNRWPERLDLLELVYYPIVMIILPNVAAFICRCMDFMMDGLILLARKTTHRQLHGGKNPPKGYRVSFWLGGIFNTVTLWLNKTIYKKHPLKRDYVLRFAEKERVFKDANKIIVASVSFSLLMFGIGIIITVLYLFMVRMPEKDNTGMGERIQSMVEDAVASMDFEQLNRNITGSIQSVFEELNIQMPQGTGQKGSRASNVRYHYGTEKTGKRAVTRYVKNPPGTVTGPVCTALGGVFTGIFGLASIVMFAVQSAVPSAGLAMAGHITLSVTIPLTIVSAVVMAKGISLVGRVRRFRRYTKLIGERTYCQVKELASAVGKNEKFVVRDIQKLIENRAFTNGHLDAQNTCLMLDDVTYRQYLETQEAYRQRSLEEQERKQEDRSIFASDGIENPELVRAMEEGSRYIEAIRRANDAIPGEEISEKLYRLEALIKKIFEVLKQKPEQLPKLRKFMQYYMPTTLKLVQTYQELDAQPTEGENIRQSKAEIEKTLDTINLAYEKLLDSFFEDAAMDIRSDITVLETMLAQEGLTKNHFENQAGGEMSEIKLEETPTLTFEPFKEEPQLPVEEAQKQMAEAAPALDDSMLSDEEKQMVKDFAAQIDIANSAQVLQYGAGAQQKVASFSEKALENVRTKDLGEVGDMITGVVTELKNFDAGEEEKGLFGFFKKNVDKLTTMKTKYQKAETNVNHIVEALEQHQVTLMKDVATLDQLYELNKTYYKELTMYILAGKQKLNQVENVDIPALAAKAQASGLPEDAQAVSDLTALANRFEKKLHDLELTRTIAMQMAPQIRLVQNNDTMMSDKIQSTIVNTIPLWKSQMVIALGVAHSEQAAKVQREVSDFTNEMLKKNAERLKTVSVNVAKESERGIVDIETLQTTNEQLISTLDEVLQIQKDGRAKRQAAEVELQKIEGDLKAKLLSMRSSVQGMTEEVYKEAAQNVTAWYRQYGRDLPWRRTGNPYHIWISEIMLQQTQVDTVKPYYERFIETLPTVEDLAGADEQRVFKLWEGLGYYRRASHLKEAASMIVNEYHGRFPETYEELLKLKGVGMYTASAIASIAFGIPKGVVDGNTLRIVARLFNREDNIALQKTKNAFGEIMDAMIRYAEPSDFNQGMMDLGAMICTPSKPSCDECPVASLCQSRECQTVLRLPVNNKVVNKSILEYMTVVIRDGDRYFMVQNEQGLLQHLYGFAQYGCDMPSEFEKAFYDDYGVKIRLTQYISDIKHVFTHREWRMHVYGGEVVDPATRPMRDFYKLEEIEQLPVSTAHLKVLKAYLKVLQMNIREEREAWERAYLSPYASRSSETRGRDREEQKCDIRPEYQRDRDRILHSKAFRRMKHKTQVFLAPRGDHYRTRLTHTLEVSQTARTIARALRLNEDLTEAIALGHDLGHAPFGHAGEAVLNEICPEGFKHYIQSVRVVEVLEKNGQGLNLTKEVRDGMMNHSTSRMPKTLEGKIVRLSDKIAYINHDIDDAIRGRIITEEELPDRYTDVLGHDSKERLNTLIHDVIDNSMDQPDILMSSHVEEAMLGMRRYMFDHVYTNPKAKNQETKAQNLLRELYEYYMKYTEQMPEEYRRLITDGRCSRERAVCDYLSGMTDQYTIETYEELYIPKAWKIYMYYPDEVIEEVRSSNNIVDIIGGYVRLQKKGSSYFGLCPFHNEKSPSFSVSPNKQMYYCFGCGAGGNVFTFIMEYENQTFPEAVKILADRAGIALPEAELTEEQKRERNKRQLLLEINKTAANYFYYQLNGDQGQQAREYLENRRLSKETQIHFGLGYASKYSNDLYLYLKKKGYQDQILKETGLLTYDEKRGAHDKFWNRVMFPIMDVNNRVIGFGGRVMGDGTPKYLNSPETMLFDKSRNLYGLNYARTSRKPYMIICEGYMDVIAMHQAGFTNAVASLGTAFTAQHSVLLKRYTQEVRLAYDSDGAGQKAALRAIPILKSAGINVRVIHMDPYKDPDEFIKNLGTEAFQERIDAAESSFMFEISVLEKNYKQSDPEGRASFMKAMARRLLEFPQELERNIYIDAIAGRYGIASEELKRMVNSFGASMSREQVEAAIYQQQEREEMPAKKRVEKEDSVLTAQKFFLTWLIEEPSIYDKTKDYINEDDFVEPLYHHVAALVFEELRATGQVMPARILNQFEDVEEQKTAASLFNTRLKTDDDPAVREKALNETVKRIKKNSLELKSRSVREIADLQKIIKEKAQLQKLYISLMDENMAFFMDKLKELVPFAKEREQELTSDMISDFFGHMPLTEEQMEKIYDYLESNGIFVDRSNDEPDRRMLDEAEEEIDPNDISVPEGIGTNDPVRMYLKEIGNIPLLTPEEEVELAKEMKEGSKQAAKKMAEANLRLVVSIAKRYVGRGMQFLDLIQEGNVGLIKAIEKYDYTKGYKFSTYATWWIRQAITRSIADQARTIRIPVHMVETMNKLTKVQRSLTQELGREPSVEEIAENVHMDVNRVREILKLAQETVSLETPVGSEEESHLADFIEDDHTPLPSDEAAFGQLKDDIRSVLDKLNEREQKVLRMRFGLDDGKEHTLEEVGQELHVTRERIRQIEAKALRKLRQSGKSAGLEGYLNQMQLSIRMQAVADMVTPGGRIADIGTDHGYVPIYLVEQNKADHAIAMDVRKGPLARAGENIVRFGCSDRIETRLSDGLAMLKPGEADTVIIAGMGGLLTIRILEAGLKVLQSVSECILQPQSDLDKVRQFLHQHGFQIVQEKMLIDEGKYYVVMRVLHGEERIYTEAEDIYGRFLINEKHPVLKEYLEKQKAVKEKLLLALKNKTSEKSHERQQELLHELQIINETITRMVDENAEQRPDMKMQSRDLIKKLEKLAPPEYAESWDNPGLLVGSADREVHKVYIALDADGGAVEKAVQCGCDMILTHHPLLFSAIKSIRDEDFIGHRLMMMIENKINYFAMHTNFDVAVMADIAADRLGLKNRMPLAMVRETESGLKGIGASGTLDDELTLAELAALVRKAFDLPQVRCYGDPETTVRKISMCPGSGKGMDADVLKAGSQVFITGDVDHHYGIDCVEKEICVIDAGHHGLEHIFVPYMEQWLKENCPEIQTVTDDNQSPFFVIMSKIHLKTGKGCFTYEAGTTLEAISRDFQEDYPHDIILARVDGKLAELNSCMDRDAEIEFITTGEAVGNEVYRRTASMMMLKAFQDVVGRDNFERLTVQYSLDRGYYCELVSDTAVTKSLLDKVKTRMMEIQQAKMPIIKKSLPKREAIEMFREHKMYDKVNLFHYRRSSRVNIYMLEDTIDYFYGYMASNTAYIRYFDLYLYDDGFVLQMPEPSAPEKVDAFEPPEKLFNVLKQSTRWGELLGVRTVADINNALADGSFPELMLVQEALQEKKIAEIAENIIESGKRIILIAGPSSSGKTTFSHRLSIQLRAHGLRPHPIPVDNYFVNREDTPLDAYGKPNFECLEALDIKELNKDLQGLLAGEEVELPIFNFVSGKREMSGEKLQIGDRDVLVIEGIHSLNDAMTYSIDKENKFKIYISALTQLNIDEHNRIPTTDARLLRRIVRDAAKRGTNAAKTISMWQSVRRGEDENIFPYQENCDVMFNSVLIYELAILKQYAEPLLFSVREDQPEYETAKYLIKFLGYFLGSSSENVPQNSILREFIGGSCFNVGMAEQIEILVVDDDKEIANLVEIYLSSTGYKIHKAYNAVDGLALLQKCDIKLAIIDVMMPQIDGIEMCRRIRTCRNIPIIILSAKSADVDKILGLSVGADDYMIKPFNPMELLARVKSQLRRYLELNPGVVPDSNMIEVQDVVIDTKKHRVTVDGWDVVLTPIEFNILQLLASHPGRVFSTDEIYENVWNEKLYEANNTVMVHMRRLREKVEKNPRSPQLIKTVWGVGYKIEGMKVKLTESFRIRIMLYTCISLLAAVLMDMAVLLFCIRSRILVSDYGLNEKINLHAHSSNYMINNQIHASTKSMLGESDIFYRIFGVGIKVQLIIVLIILALIIFLMVFFLLTRRVMAYMMNILQGACTMADGDFSHRIDVRYHDEFSSIADSINRMADTVEAMKQKEQEAEETKNELITNVAHDLRTPLTSIIGYIDIVNNMPDLSEKQRSKYLKITWEKARKLEKLINELFSFTKISYGGMPMRMEKIDVIKMLEQEADELYPTFKENELECLLETDADSCMIMADGEQLVRVFDNLLGNAIKYGRYGKMIRIRTLTENTQIQIQIVNYGSVIPAENLPFLFEKFYKVDASRQPSGEGTGLGLAIAKSIVESHGGSISARSSFEGTVFEVVLPTAGAYQNGVVAMTGVRNRIGLVVVLLLILIPAVYVLADEAYIDSDRFTVNTAEIDGDIQFTDVTGCSVRMQVTNHGDDFEGTLKILRYECTDGSYVSAVGRTVHIKSGETQDIYLKLSNIAYDGTPYHVPLRVDFLDKDGQLLCQKITDFQVSPDITTKVAAGVYADDAQKLAVIDQSRFKYETTNISGDITMKSRQMTDEELANIKQLNINLLILDKVVSESTWENVSEWIMCGGYAMMEKACCQNMIHKMPDDNGLVDWGKGRILVYDASEWNGIMFLKSVRNLFGTDGIHALIAGDYSGYYWNVQTILNYDIASKLPPVTIYFVILLIYILCIGPAVYMILKKRDKREYMWLWIPCLAVLFSVIVYKAGSSVRYAEPFIRYYSVVDITEEANIEQTKLVLISPNKGRSVFSIDSQYNLKLLNDMYLLYDDQNDRLTALKEKFGDAEYNVAMSVSDTRTDVMVNSAATFDEDHFSNERILNSEGGIDVDAAYYRGELTGTVTNTTPWNLHDAFIIHKGLLFQLGDLDAGQTIILDHLKEAQLVKSRNDVLDTWEMKNEGNTAAVSAVMSDLIGNITSASSMTLADDIVGGFSMDYDIGVQISEDIASVDGITLIKEKTAIADSGSGWATQALIGPEEPESEEDLYAYDTDSYMIYGTDMLNVSYVVERLSGELYLKWLNPDAGMSVSFYNLSTGVYDTVFRDSDEMAEDDLKNYIAKDGKIKAHVQAADANEDHYMPVFTVSGGEENDMIEIRHLYKAFDNHMVLRNLNMKINEGAVYGFVGPNGAGKTTTMRIIAGLLKADSGQILIDGEDIDARHKELIGYMPDFFGVYDRLRVKEYMAFFASIYGLDKEETEKKIRQLLELVRLTEKKEAYVDSLSRGMKQRLCLARCMIHDPKLLILDEPASGLDPRARYEFKEIIRQLRKEGRTIMISSHILSDLSEMCTNICIIDEGRCVMEGSVDEIEYHMITASPLVIRTAGRQEDAIRLIRQNEMVETLSYNENEIQAVFKGEREDEVMLLHELMAADIPVYSFGRDRSSLETLFMQITDREVKEHAHESGLMRMNPVYKNELKMSARSMQLPVLAVIFNSILSVVALIALYGIRQNYINSGGNPYHSMMILYVVVLTIEVVLLCLFVPSAAGGSIAGERERQTLDILLSSRMTVREIVTGKLLSCISMAVLLVVTSIPILAVTSMYGGMQLGLLYQSAAYVGFFILFAGSIGVFCSCRFKKTTYASISAYGLLIVLTIGTGLLVLLLNMVFGGGFGQFSVTASVSDISCAYSSEVDMGTEVPTVHAVAGIIYLWLLNPAITYGMLISHQIGEIGIVEELLHRMGAAQVVVEHWLAVSVSVQAVFIIIMTALSTKYLDPQNERFKAGNKILKKHKSQMTQESWFQRLWRLITPELIYLAICYIVDLAAAAYLRFSMGGEYSSGNFEKFTVVLSDKLIQYAVLLQTVAAFFSILILLRMYYKDYRKRRFVFERKSTAWPWWGLLIPIGILVSLAGNLLINLTNLTELSENFEQSQKLLFSGPFVIQIIGIGMIIPICEELIYRGLIFMRMRQYCNVNLAIGLSALLFAVFHGNVVQGIYGFATGVLFAYVYEKYGSLKAPVLVHVSANLMSLGLSYVNPSFADRGRVFIVGIAAAAVCLLLLWAVDGHVAARRIYLNNADAAAGAQEDMDNSEKLKALDAAISKIEKDFGKGAIMKLGDKSKNMDVETVPTGSLSLDLALGLGGLPKGRVVEIYGPESSGKTTVTLHMVAEVQKRGGIAGFIDAEHALDPSYARRIGVDIDNLYISQPDNGEQALEITEMMVRSGAVDIIVVDSVAALVPKAEIDGDMGDSHVGLQARLMSQALRKLTAIISKSNCIVIFINQLREKVGVMFGSPETTTGGRALKFYSSIRMDIRRIEAIKQGGEIVGNRTRVKVVKNKVAPPFKEAEFDIMFGKGISREGDILDLAANTGIVNKSGAWYSYNDAKIGQGRENTKNYFRENPEIMEEIEHKVRAHFGLEAEGNDENAGGQRSDSVKKGSDVTASETVTENEMTVTAIESVTRHKMRVSLDGEPAFVFTDKEIREWNLEEEMVLDDSEEQALLQYVSREAARTAMNLLVKRDYAEAELYRKLRDKGYSEFFAGKGIEYVSAYHYLDDARYARQMIGSRKDTTSRKMMVSRMRQKGLSDEVIQEAMEEADWTDEMGLTRELRRRFSSAEQIESLTDKDRQKLIQSLMRKGYGYSDIQHVIRHLDELEEGTTWNMELSILLAEQIFSLLLMVLTGYVVRKLNVVPKSGRKVLASIVLYVSAPCIVFDSFQIEYSSEKLFGLVVGFAAACIALAVFIWAASVCKKIFHLSASEQTSVTYANTGNMIIPLVNNILGSEYVLYTSPYNCTQTALLWIHAYNLITGNKNVQLKKILLNPNIIAMVAGLIFFLLGIQLPGPLHHTVTQLGSLIGPLSMLNVGFIMAEENLLDVFKGRKIWLVTILRLIILPMIMIFCVRLTGITFRFPQTKSVLLISLLAAAAPTASSIAQFAEIADNDAVPAGKINILSTLCCIITMPVVIMIYQVLCMPVIAIIVLVLGILLILAGLYLIKSNKDKAEKIGNAEEKARNIIDEALKAAETKKREGLLELKEETLRNKNELERESKERRSELQKFEKRVLAKEEALDRKADSLEKRESQLTSREDKLNKRQAEVDALSEKRVQELERISGLTSEQAKDYLLKTVEDEVKHETAMLVKELETRAKEEAGKKAKEYVVTAIQKCAADHVAETTISVVPLPNDEMKGRIIGREGRNIRTLETMTGVDLIIDDTPEAVILSSFDPIRREVARIALEKLIVDGRIHPARIEEMVEKAQKEVETMIREEGEAATLEVGVHGIHPELVRLLGKMKFRTSYGQNALKHSIEVAQLSGLLAAEIGVDVRMAKRAGLLHDIGKSVDHEMEGSHIQIGVDLCKKYKESPIVINAVESHHGDVEPTSLIACIVQAADTISAARPGARRETLETYTNRLNQLEDITNSFKGVEKSFAIQAGREIRVMVVPEQVSDADMILLARDIAKQIEAELEYPGQIKVNVIRESRVMEYAKMSETCNESSCSSCSVEGCSSRKAADMKEPANQYSHIKHVIGVVSGKGGVGKSLVTSELAVKLHRQGYKVGVLDADITGPSIPKVFGIHEKAVGNDKGVFPAQTPEGIKIISVNLMLDNEEDPVIWRGPVIAGVVKQFWNEVIWGDLDYLLVDMPPGTGDVPLTVFQSLPVDGVIIVTSPQELVEMIVKKAYNMAKMMNVPVLGLVQNMSYLLCPDCGRMIYIYGEGKGEQTAKELSIPSYASLPIDPSIAALCDAGKIEEFDHPYLDAMVKYLSSLNMFTIREYAMPETLDEAYTILKSRKGNQILGGCAWLRLGKKRINIAVDLTKCGLDYIREDDEQIEIGAMTSYRSVETCDILKKYFNGVIADSVSSIIGTQFRNTVTVGGSVYGRFGFSDFLTPLLTLDTSVVLYKRGSIPLETFMTMPYEKEIIEKIVIKKDGRRSSYQMFRNSRGDFPILNLAASRTEAGQWIVTVGARGPKAIRAEKTAAFLSDKLSQNALKAEDVEAVIQEAGEILVSEVTFTSNMRASAEYRRILGKVLLGKAVREVMACMLVHIFINGEKRKVHCQPDAMLLEVLRDAGCKSVKCGCDTTNCGLCTVWLDGKPVLSCSVPAARVNERHVTTLEGIQDEAEAFGKYLVGEGAEQCGFCSPGLIMNVVAMKKELDHPTDDEIRHYLEGNLCRCTGYMGQMRAIRQYVDEEVEAMRYVSQPVKKLDGMPIIKGKPLYTNDLAPNECLIVLALRSPYAYARIKSIDTSKAMLVKGVECVLTYKDVPHVRFTNAGQTYPECSAYDRLILDEYVRYVGDEVALVAANNEKAAQQALKMIKVEYEVLEPILDYKKAVDNPTIVHNYDDYFMHIPSFNADNKRNIVVDGVEEHGDVEKEFAESEVIAEGEYEVQAQEQCMMESFRTYTYLDHMNRLVVVSSTQVPFHVRRSLARALQIPQSRIRVVKPRIGGGFGAKQTIVSEYYPAIVTLKTGKAAKMIYSRKETFSCSNSRHQMCIKVRVGADKEGNIHVIELDTLSNQGAYGEHGTTTIGLSGHKAIPLYNQARAHRFKYRGVYTNMMPAAAFRGYGATQGQFALESTVNKLAHMLNMDPLLLREKNMLRMGEIMPAYYNEPLNSSALDRCIQRGRDMIGWDEKYPCKEISPTKVRAVGMSISMQGSGISNVDTAGAEIKLNDDGFYTLKIGATDMGTGCDTSMTQIAAETLLADIDQFIVAGVDTDISPFDPGSYASSTTYVTGMAVYNAACDLKNKIITAGAKMMYPERFLDETDKVNPKKFYFDGSRVMEVSTGKTIALHDIAVHCAGTSDGNYLNGTGFYSSPVSPPPLMAGFVEIELDKETGKFDIVDYVGVVDCGTIINSNIVRGQTEGGICQGIGLAMYEDVQYDAKGRMMTDSFMQYKIPNRVDVKKIRVEFESSYEPTGPYGAKSIGEIVINTPGPAIAEAVYNACGVRVTSLPITPEKVKMGMMKNELEKRKMKEYRIHVEELLDPLYRHGCRVFSVVGSGGKTTLIRQAAMHYARLYQVGVAASTKMCLPDGQWEYKGCPPAVVSSDGQGDAKRQAAPVCFYTEHILPSGKIWDLGEQMLGQALEESDLLLIEADGSNRKPLKGWREDEPVILPATEATIGILPMHCLGEILDVTKVHRMEKFTAITGLEPGDVMTEKAYLQLITAENGLFGHSLGSRWLVLNRVNDPQLYQSAKKIAEAAVTSGVIDGWIAGCLENEMNNPTAGITAVILASGFSKRMGCNKLLLPVEGKAMIAHVFDAVRQVEFEQTVVVTGFDSIAQLAVGNGFQAVDNDNPEIGQSHSVVLGVQKTSQSAGWMFFNGDMPWLKSDTIGKLLKYADAVHIVVPRYGSRPGQPVYFPAAFKAELLALTGDHGGRTIIRNHPDRVCYVPIDNIRQGVDVDTPEGYEKVKGGDWVEMNKTIIIRGGGDLATGTISCLHQCGYQVLVLEIAKPTAIRRSVAFSEAMYDGETEVEGIKARKITQFSEAEACWQDGVIPIICDEKAEAVKAVPHFAFVDAAIAKRNLGTTIDMADYVIGLGPGFTAGVDVDVVIETKRGHRLGRIIREGQAIANTGIPGIIGGYGKERVIHSENAGVFHGIAHIGDLVKKGDLIAKVDDAPVYATLDGVLRGILRDGLPVPEHFKIADIDPRLSERENCFTISDKASAIAGGVLRAICIYENGLRSGEGRKMKCIPVQEAVGSILCHDITQILPGEFKGRRFKKGHIIQEEDIPVLLSLGKDNIYVWENLPGMVHENDAATFLKDITMGDGLTFGEIKEGKITFTAAHDGLLKVDADRLFQLNMLGEISFASLHNNLPVKKGEAVAGTRVIPLVIDQKKLNEAKKLLDGHKIIEVKPMKSFNIGIVTTGSEVYYHRIKDKFGPILRGKMEGYHCTVAGQTFVPDNKEMIKQAIKDWLDKGADMVFCTGGMSVDPDDLTPSAIRDTGCEIITYGTPVLPGAMFLLSYYTDGRPVLGLPGCVMHSKVTVFDLIFPRILAGEKITMADIAAFGHGGLCSNCAECHYPNCHFGKMKLLEEKIRSEGRALSETVLKVDGFINHQVDPVLMSEIGKTLASYYKDKGVTKVFTIESSGIAPAVYTAMELGVPMVILKKQTSKILTGDVFQTNITSFTKGTSYELTLSQNYIQPDDVVLVIDDFLANGEAATGATRLVEMGGARIAGIAILIEKAFQRGRKRLEDNGYEVRSLARVSKLGRGLIEFTEADLMPLPKHNAYTIEDIYALPDGQRAELIDGQIYDMAPPSRIHQKISTQLVSCINHYISEHHGNCEVYAAPFAVFLNKDNKNYVEPDVSVICDPDKLDDKGCNGAPDWIIEIVSPSSQHLDYLTKLLKYRTAGVREYWIVNPLKDTIQTYSFEGEENSVQYAFDEIIPVTIYSDFKICIADLLKMHFLKLLKIERIKCKRSKIIPFIFIAPILVVSSGVANLSTYFTPEYTQAWPAMFIQSALLYAYYLLPFSMIVVCVMITGQENSHNGLLKMLALPVNRHTLSLAKFCILVFYLLMEILVFLAVFVIAGYIAVVTSGITETLPLSYLLKWCAGLFLTMLPSLSVMWMLTVLFEKPLLSVGLNLLLVIPGLLAGATPAWFLYPYCYSGYLVSRSLQAFTTEVTADTALQLFPFIPCAVLIFTLALFISASRFGKQTMKTLIIELKKEKRTGIILLMPALGLLGGAYALLNFIVRKDTLLSLPLAPMTILLTQLYGMIMTLNLFGIIVAACMIYNIEFKGNAVKKMYVLPIHVPAMYLCKFLILTILLSVAAALQNLALTQIGITSLPEGTFELYTLIIFALYSLITAMPALSFMLFIASRFENMWISLGIGVAGFLSGMALGVPKIGLFLADPFVIMLKPAVSMSTRPDVSVIAIAIVETLLFLAAGLWTSANIHYEMNNMITTCHLTKKYKSFTAVNDVSLHIQKGRIYGFLGPNGAGKSTTMKMLLGLTTPTKGSFTINGKHFPDDRLEILKGIGSLIEAPFFYANLTGRENLDIIRRILGLPKHAVDDALALVGLTEFENRLAKKYSLGMKQRLGLAEALLGRPPILILDEPTNGLDPSGIHEIRNLIKSLPALYDCTVLISSHMLSEIELMADDIGILNHGRLLFEGELEELRHYALQRGFSADHLEDMFLSMIEQDNLSRKQRAKLMSDNYLLHKRILVVDDEQALLDMICSILQAYGFQNTTTAKSVREALMEAEKCPPELAILDVMLPDGNGFDLMTQLKKKGDYPVLFLTARGEDEDKFRGFGLGADDYMVKPFLPKELLFRIMAILRRCYKDENPLVQLQNSQIDFARAEVIKSGMHIPLTAKEHRLLWALYRNAGCIVTIDALCEAVWGDNPFGYENSLMAHIRRIREKIEQNPSQPVSLVTIKGLGYKLNVEGRMKSAAKLIRRFVSILLLSAVLLVIINVAVYAVLVSEKAPTETTSPYDIAEKAGEALQVLPDGTYCLSEEVSSELEEKNIWAIFIGNDTLQTEWKSHNVPEMIPNHYSLSDIAALSVGYLKGYPTYVGNNENGIVVLGFSKDSFWKHMRASWDYSLIRDLPYIFLKILLINLVLILAIYMLVNGKLLKSVQPMIKGIQNLSAGEPVHIPETGVLSEICTNINRASDILQKQQEQLRKKERARANWIAGVSHDIRTPLSVVMGYAGQLENSHHLSEDERKKAAAIVKQSARIKNLINDLNLASKLEYHMQPLMKKRENAVAIVRQVVVDFMNMAVDDRFLIEWKTDAALQVCEIEADRELLKRAVVNLLQNSMVHNENGCQIDVSVEAKDGSCMICVDDNGEGVSDEQIEKLNHVPHYMVCDTNVDGQQHGLGLLIVRQIIEGHGGAMTISRGTYGGFHVTLIIPCEKITHLSMESLKILVVDDESRMRKLVKDFLTKKGFTVIEAGDGEEAVDKFFEVKDIALIILDVMMPKMDGWQVCREIRQYSKVPIIMLTAKSDEKDELQGFDLGVDEYITKPFSPKILVARVEAILRRSNVLAADDTMEAGGIELNKAAHEVLIDGKSVELSYKEFELLAYFMSNQGVALSRERILNNVWNYDYFGDARTIDTHVKKLRSKLGAKGEYIKTIWGMGYKFEVDQMFRKKSLKVKLSLILIGMVLLISVSSVLLSNIFLKRFYLAKKNQTLISTFEKIDDMYAAELQGKTTESGESSSTDESLGSYAIPDSGISDELYLQLDKLSQTRNLSVIIYRDMSSPIFDYMLKSNTKLLLYSSLGMNQNSKVESSNIYSDYINADKSGDAASVKTDSYEIEKVNVKRLGASYIYLAGTFKNGDHILIRASFSSITESAALSNQFFLYISLVAALIGFVVMYFVSNRFLGPITVLTNIAKRMSELDFTAKYEVKTEDEVGVLGNSMNMLSETLEQALAELKEANTELKKDLEKKEQIDAMRKEFLSNVSHELKTPIALIQGYAEGLMDNINDDEESKEFYCEVIVDEARKMNQMVKKIMDLNQLEFGYNTVTMEHFDIIAMIRAVIAKSDILLKQKEINLAFDEDAPIYVWSDAYMSEEVFTNYLTNAINHADGEKRIDIQLEKKEKTVKITVHNTGEQIPEEDLSKLWDKFYKVDKARTREYGGSGVGLSIVKASMEQLGQPYGVYNCEDGVSFWFELDCQDAAEMIQEQAMKTAFYVESYGRQVEEKALIAKIKEIWVAEGNKIKDIKDLNIYAKPEDDACYYTINGDFSGHIKLYEMIAIIDYDAGNMKSVEKAFQYLNEDAVITRDRKAILEADRVVLPGVGAFGDAMERLHSYDLVETIQDAVKSGKPFLGICLGLQLLFDSSEETPGVKGLGLLPGEILRIPAAEGLKIPHMGWNSIDIKEDSRLFEGIDRQSYMYFVHSYYLKARNPEDVAATTWYSTDIHAAVEHDNIFACQFHPEKSSELGLRILKNFADLRLMFTKRIIPCLDVNNGRVVKGVNFVNLKDAGDPVEIAAAYDQAGADEVVFLDITASSDGRNTVVDLVRRVAEKVFIPFTVGGGIRTVDDFRAVLREGADKVSVNSAAIDRPELIHEAAEKFGSQCVVVAIDAKKRANGEGWTIYKHGGRIDTGIDAVEWAKRVCDLGAGEILLTSMDCDGTKAGYDIELTRAVAEAVSVPVIASGGAGTMAHFYDALTEGKADAALAASLFHYKELEIRDLKEYLASRSVSVRLMGAIANDWLEPLKPEFAKPYYAQLYKKVKEEYTTHQIFPPSDMIFHAFEVTPLEDVKVVILGQDPYHGDGQAHGLCFSVQPQVAIPPSLENIYKELQDDLGCYIPNNGYLEKWAKQGVLLLNTVLTVRAHQANSHRGIGWEQFTDAAIKILNQQDRPIVFILWGRPAQQKKAMLNNPHHLILEAPHPSPLSAYRGFFGSKPFSQTNRFLEEHGVAPIDWQIENIMKKQWWHDKVAYQIYPKSFMDSNGDGIGDLRGIISKLDYLKELGIDILWLSPIYRSPLVDQGYDISDYYAIGEQFGTMEEFDELIAETKKRNMYVLMDLVVNHCSSEHEWFKKAMTDPEGEYGDYFYIRESKDGQPINNARSYFGGNIWEPIPGTNKYYLHMFAKEQPDLNWENPKVRQEIYKMVNWWLDKGLAGFRIDAIINIKKNLDFPMLEPDGLDGLAFCTKTLGTKDGVSEMLGELKRETFDKHGAFTVGEVFNITDDDLSDFIGENGYFSTIFDFSTELLSAGEHGWYDAPDVAFPAWKKAIFHAQDQAYGCGFESNIIENHDEPRGVSRYLPVYARNSCGTKMLGTMSLLLRGLPFIFQGQEIGMTNTNWQSVDEFDDLNTVDQYHLALKAGLSEKDALDKIGRLSRDNARTPMQWNTSSNAGFTTGIPWLHLNDNYPDVNVATQEKDTDSVLNYYKKLIALRKSDTYKDIFTYGKTIPVFLEKEMLMAYCREKDDKRILVLGNFGEKKEALHLSAEPKKLLLFNMNHTEIGQDIILAPQESAVVLLMDATLFLGIDVGSTTVKVAILDSDNNVLFSDYERHFANIRETLLDLMTKARAELGDRDLHPMITGSGGMSISKYIHVPFVQEVISVSSALGYFAPKTDVAIELGGEDAKIIYFENGNVEQRMNGICAGGTGSFIDQMASLLETDAPGLNEYAKNYKAIYQIAARCGVFAKTDIQPLINDGASKEDLSASIFQAVVNQTISGLACGKPIRGHVAFLGGPLHFLSELKAAFIRTLHLTDEEVIAPANSHLFAAMGAAMNYKADVTTSIDELIRLLSSDIKIQAETARMDPLFKNQEEYDAFKKWHSVHTVTEGNLADYHGKCFLGIDAGSTTTKVAVVGEDGTLLYSFYSNNNGSPLKTAIRSIQEIKNILPADVEIVRSCSTGYGEALMKSAFMLDEGEVETVAHYYAAAFFEPDVDCILDIGGQDMKCIKIRNKTVDNVLLNEACSSGCGSFIETFAHSLNYSVEDFAKIAIFAKHPIDLGSRCTVFMNSNVKQAQKEGAEVGDISAGLAYSVIKNALLKVIKLTDPKDLGKKVVVQGGTFYNDAVLRSFELISGCKAVRPNIAGIMGAFGAALIARDRYTGEATTMLSLDDIINLKYTTSMTRCGGCTNHCRLTVNKFTGNRRYISGNRCEVGLGRAKTNSDVPNLFEYKYNRIFNYKPLDKATAPRGIVGIPRVLNMYENYPFWHTFFTELGFSVVLSPESTHEIYNLGIESIPSESACYPAKLVHGHIMWLLQHDVKFIFYPCIPYERKETEGATNNYNCPIVTSYAENIKNNVEELADPSILFMNPFMTFESERHLEERLVEEFAVRFSIDPREIKEAVQKSWKELELVHTSVQRHGEMTLAYMKQHHMKGIVLAGRPYHIDKEINHGIPELITSYGFAVLTEDSISHLAKPDRPLIVSDQWMYHSRLYCAAEYVKEHEDLELIQLNSFGCGLDAVTTDQVKDILNGSGRLYTCLKIDEVSNLGAARIRIRSLIAAIRLREQHGIHGHIESSAHHRQLFTKEMRADNYTILVPNMSPIHFDLLIPALRHEGLNCELLPDCDKEAINTGLKYVNNDACYPSICVVGQIMKALLSGKYDLNHVAIAMTQTGGGCRATNYVGFIRRALGNAGMSQIPVVSISAQGIEKNPGFKYTLPMLKNALQAIVYGDLFMRVLYATRPYEKVPGSANALHEKWKNICLDSMIGKGKNSFKQNVKGIIHDFDNLPLDETIKKPRVGIVGEILVKFSPSANNYLVDLLESEGAEAVMPDLLDFLLYSFYNSNFKYEKLGKSKKGQILGNAGIAFLEAIRKTASDELKASKRFDPPANIRDLAKYAEPIVSIGNQTGEGWFLTGEMMELIHNGAPNIVCTQPFGCLPNHIVGKGVIKELRHQHPEANIVAIDYDPGASEVNQVNRIKLMLATANKNLHKKLDAMTMNYYVSGENVNGRPCRGVVHVVKKGDTLYKISRVYDVKVADLIWMNPGVRIYNLQVGDKICVPVSSWEMPDADHDNAETLPYIVRAGETLDAILQTFRLTYEELQKLNEDISPAYAEGTVLNIPSNRILRRRQEAQMHIVHPLLCSCIFYAVLIDKNSWKIYNYSIAYKNKRKGENLLEKFLNKMERKFGRYAISGLMKYICVLYIIGLFINIASPQVYYYYLSLNPYRILHGEVWRLVTFLIQSPNSNVIFFIFTLYLYYMLGQTLERVWGAFRFNLYYFAGVLFTIIGSFAAYFMTGQVYLMDTYYINMSLFLAFAFVFPDMEMLLMFLIPIKIKWLAYLDIALFVYEMVVGNIGTKISIAMALLNFVIFFFGFMRKRVSPAQMHRRAAYKKAVKKMPSRHRCAVCGRTEETNPELEFRFCSKCNGNYEYCQDHLFTHTHVQMRWYNKMYLGKSIQGKKMYYQYAIQHTKRLTGTYCLMPAACKDDLIDICGSDLLRVSKQYPKDQLVIGLAGSYREACLLAGEIVLDVLKKTGSTDIRAYLRDSGENIMLLLHILLFLLKLIGIVLLVILGLIVLILAIILLTPIRYRIGASKYQTIQAEGKVMWLFRLIEMVFKLDTGAEEGKRLHLSFRIAWLKLYDNQKPKEKRIKQKKTRKTKSKAESKQSKKVIQAAKPEQPEAKVQPIKTEQAAEMKHEEKLIEGPKESAVEKILRLAKNVANKILSLIRGVFSLICSILGIPSKIMDGLEKLENFFTKLREKKEAFLAFYNETHNHQWFTAFWHRLKKLLLRILPRADRLYLHFGFEDPATTGQVLGGLSILYPIFGEKMELCPEFNEEILEGEVKCHGRIRPVSLVIFAVKSFLNKQFFSMVKQFKVLLKGEMSDHTFNETVESLFKGMDNFLTTKTVVGEAIHVNDTLILPLVDVSFGVGAGAWSQEHKNSAGGGMGGKMTPSAVLVIKDGSVRMVPVNNNDPVSKIIDMAPDVIHRFMNKSEDDAAVESAVEHISEEEMGSAMKKMCGFVLFWIAAGMTIMMFVNSCVLGICLIIFCLILAYNLFCSKMSQLMQLQIENERTFLTYKYKKVQDIDDVILQLLNEADIEGFAESHMNKAKSTVNYDVTGYRKWSEFSSDELTPEVMASAMENLYHLLAYLEDSFIDIEYVLLDKEYIYVNPGNGKLVILVVPCQAVVDEEYTLTDCVRQMFEQFTYGEGACAKQLKSCLQQEIHALETLKELADLLRAYDAEPKEPGETVSDEPAVPEETVILETIEEEADQIKTESANIAADAEYMRNQLREDMRRELEKELREQIREETRRELETELRESIRAELEEEQAQAETSDEKMPYLIRKKTGEIISLNKQTFIIGKLDTCCDYVIRGNRAISRLHAVIKYKEDTDVYFIVDCNSTNHIYLNGRQIEAEQPETLEDGMHIHLALEEFVFQLKMAKCAICEKGAHFGIQVSHSHRRSNKMWKSNIKKVKVNVNGTPSKMYVCTSCLRSGLVERAMKGRIITDIGQVSVDTDVIAKYAGMAAVECFGVVGMAMISVKDGLVKLLKRESMTKGVGVTVNEDNQITIDFHIITVYGINIATIADNLMNNVKYKVEAFTGMKVEKINIYVEGVRVIDMGVKTIDANMLKNMFLAGAKRIESKKEWINELNVFPVPDGDTGTNMTMTIMSAAREVSALTDPDMESLSKAISQGALRGARGNSGVILSQLFRGFTRPIKDEKVIDSVIAAEAFKKASETAYKAVMKPKEGTILTVARGMAEKAADIFDATDDLEEGFRQIIEYGDYMLSLTPEMLPVLKQAGVVDSGGQGLMTVLKGAYDCLTGAETADDFVAEVKPSAPAGNAGKMGLDEIETANIRFGYCTEFIVMLEKPFDEKDEDEFKAFLASIGDSIVCVADSDIVKVHVHTNDPGLAIQKGLSYGSLTSMKIDNMREEHHERLFKDAQKLASAQAQADMQVKAEKKEEPAKEAGFVAVSMGDGMKKIFQELGVDEIIEGGQTMNPSTADILDAVERVNAKTVFVFPNNKNIILAAQQAKDLVEGKTVIVIPSKTVPQGITAVINYINGSSAEENEAAMNEEMQRVKSGQITYAVRDTVIDDKTIKEGNIMGLGDDGLLAVGEDIAETTMATIAALVDEDSEIISIYYGEDVSEEEAEELTEKLEEAYPDCEVELNQGGQPIYYYVVSVEMNPGDRISTIKGIGAKTESHLARIGIYTVGDMAEHYPREYHAYDTPVSIENTEYDNRRQSGYRVIFSETPKLLKRGRTPIVSVMLHAGNASVQVVWYHSPYVRQQLKPGCTVILYGKITSKGSRRMLDHPDIYTEDQYALLQKSLQPVYGLTEGLTQNFFMKTMHSILDSGLLLPDPLPADIRRQYQLSEYNYALRQIHFPENEEACRMARKRLVFDEFLVFALSVKQLKKENHQIENHYQIQESAAVSQLIASLPYHLTKAQLRVWHEIEEDMKSPVVMNRLVQGDVGSGKTMIAALAMFAAAKAGFQSCMMAPTEVLARQHYENLQALYAPFGIETVLLTGSMTAAAKRKTYSRIENHGADVIIGTQTLFQEKAVYDKLALIVTDEQHRFGVRQREQLAMKSNGGEPHVLVMSATPIPRTLAIILYSDLDISVVDEKPANRLPIKNCVVGTSYRPTAYRFLEQQIRQGHQVYVVCPMVEESENIEAENVQEYTEKLKKVLPADIKVEYLHGQMKPEQKNGIMERFSEGEIQVLVSTTVIEVGVDVPNATVMMIENAERFGLAQLHQLRGRVGRGDAQSYCIFIYGQENKKVKDRLNIMLGTNDGFKIASEDLKLRGPGDMFGIRQSGSMIFKIGDVFADSACLVEAGKAADHILSEDPELKSEKYAFLGSRITAKLSENREQVILMRVIAGKARRIQLKSMEGMNTRPTTDRIKETLFNMLSQDIYGCHFLDLFSGSGAIGIEALSRGAASAVFVEHNRQAVACIKENLTKTKLMSQAEIMPVECQTAIRQLDDGKRHFDIVFMDPPYNKQLEKEMLIQMQHASFINEETMIIIEASLETEFDWLETYGYIAAKVKKYKTNQHVFVQRVLEKMRTAIYPGSFDPVTYGHIDIIKRSAKMVDKLIIGVLSNSSKTPLFSVEERVNMLKEVTKDIPNVEVTSFAGLLIDFADACNAKIIVRGLRAVTDFEYELQWAQANRAVRPHLDTLFLVTNVEYSYLSSSAVRELARYHGDVSLFVPPYVEQKLDEKLDSKENEHEQNMSRIEQLIDEIEEYVEGCKPAPFSQSKIIVQKEQLYELLTELRLKTPDEIKRYQKIIAQKDKIISDAQAQAEQMIEETTNYANALVEEHEIMLKAYEKAEQTINAANAQAEEIVAAANQNAEEMRMSALSYTQSLIVNIQDVVQRSLDIAKTNSEGLINGLSENLNILVSNNEALVSQLNDKQPAAAEELPAIDDEEDTVADMTGHDEAAEEEDDKTEDQKQPVSEETKEEVIEEEDEEEIDDDEYDDDDYDDIDMKKHLTSILLLLLPAVLIIYAPQAVRGASAGLVLWFNQVLPVLFPFALILQLIMSVNALSGISCLTAPIMQKCLHLSPACSFCILAGFLCGFPMGTAVSVQALENGLISRKEAQLLSGVCNHASPMFFGGYILDQILPDHPLHSCLILIFYASPFLWFLLRCFFLHHPPASVRDRAVAKSTRPSAPLPFRTILLNASELMLKIGVCMMIFSILQAIIGSLPFVPASLSAVLALFLEITSGSAAVRLLPLQLCLKTSLIMGGTAFGGLCIAFQSFALLRTQKLSCVQYLADKSAVGMITAALVWILYQIVMTIAAVIAEYNPFHNGHAYQLREIRRQTGADLILVMMSGDFVQRGAPACTDKYTRCRMALAAGADMVCELPVYGALGSAEIFAESAVSLLNQLGCIDFLCFGAETIDPHLFHAIVSVLSDEPPEYRTLLQDALKTGMNFPAARSYALGRLLKNTHCSHILNLPNNILAIEYMKALCKTGSPIKPIAIRRTGAGYHSMETTAGFQSATAIRHQLSDGTLNPSECIAGLDIPDTSKVLLQSYLTHRPILTSNDFSDVLAAQLLDVHTDLTEYVDISSDLANRIDSFRYQFLSTEQFITLLSARNLTSTRIARCLFHIILDHRRNYLDTWRNHQYAGFLRILGFRKQSGAIWKFFQPSVRAQLITQTSQAYDHLTGIGLDIYNADLHASRLYRQILKCRSQSFLPDITSEPVIILPMQINISEIISTDYKVQTFNPEIEMEVFCLDGERYNFIRKSPVELKAQNEGHSVVNFSGHVDVTIDIPCSRCLTSVPTRLAFDFSQKVDFEKLKAEQLDDLDETSFMEESSLDVDRFVYNEILMRFPMKTLCREDCKGLCLKCGKNLNEGECGCDRASLDPRMSAIRDIFNNFKEVMSICPKNKSSKARRDSRRANWKMSVPSLSKCSKCGALVMPHRVCKACGAYNKKEVVKVQMRRSIRRYLSMLLVMLMTVSAAAVICTKNAYAGSFSGGYISLGADLTEEEKSKVLELFGVDEKDLENYKVVYVTNKEEHQYLDSYISSAQIGDQAWSSVLITEGKKGSGINVTTKNVIYCTTGMYANALATAGVEDVNVVVAGPFNVSGTAALVGALKAYSEMTGETVDEKVVDAAVDEMVTTGSLEDNTNADNEKVEGMVAYLKEQVASGNSKDKDLDQIINDAADKFEITLNEDQFNQLKALLEKLGGLNLDLGSLKSQAQAAYDTLKDMGFDISKIHIDTEEAKGIFQQIIDMIKGWFNMSELVRVAVDAMGGDHAPEAVVQGVVDALNASKEIEVLLVGDQTAIEKCLTGAQYDKTRLQVIHASEVITNNETPTIAIKKKKDSSIVVSQRLVREGKADAFVSAGSTGAVLVGSQVLIGRIRGIERPALAPLIPTTKGFSLLIDCGANVDAKPSNLVQFARMGAIYMEHILGRKNPRVAIVNIGIEEEKGNALVKQTYPLLKECGDINFIGSIEARDIPNGYADVIVCEAFVGNVILKMYEGVAGALMGMVKETMMSSLKTKIGALLIKNELKQTLKDFDASDYGGAPMLGLKGLVVKSHGSSNAKEFKQSILQCIAFKQQNISGRIAASITADKELLSASENKTEEMANHTLLKELQQKIDYQFKDENLLFTALTHSSYANEHKLHKIHHNERLEFLGDAVLEVVSSDFLFKNFPDMAEGQMSKKRASLVCEPTLAYCARQIGLGKYLMLGKGEDMGGGRNRDSILSDALEAVIGSIYLDGGIEQAGSFIMTHVLNDIEHKAMFQDSKTILQELLQKDHKDPITYEVVDMTGPEHNRMFVMQVKLGDRVIGKGSGRTKQAAGQEAAYHAILALKNKQEHMFLKSIEVQGFKSFANKMVFEFHKGITGIVGPNGSGKSNVADAVRWVLGEQSAKQLRGSKMEDVIFSGTESRKPLGFAYVAITLDNSDHQLAVEYDTVTVSRRVYRSGESEYKINGHNCRLKDVQELFFDTGIGKEGYSIIGQGQIDKILSGKPEERRELFDEAAGIVKYKRRKALTEKNLAEEQQNLSRVRDILYELEKQVGPLEKQSETARIYLKHRDTLKQYDANMYLLSFYQLKKDSAAIDEKMNIVSTQLKDSQENFEKIKSAYAQMEALMEQYDQKISQDQEVCNQQALEKQRLEGGKNVLVSKTDGISSKEEQFDALILETEAGIEEKKKLSEESEKELKALEEELQELEQHKNSSEEALNSMSGTMTSLRDQIDSQNSDIIEFLNEAANIKGRMQRYETMQEQTQIRQSELNQKLIALQSEESSEGELVEAFKKEAQGIELELERLQAEQSACKKRAAKISDDLMKCREAFNAAEKSFHEESARYQTLKNITERYDGYGVSIRKIMERKSDYKGIIGVVADIIHVSKEYEIAIETALGGSISNIVTDNEQTAKSMIQFLKKNRFGRATFLPLTSIRGRRAENADRICGEEGVIGLASDLIRVDSQFGHLADYLLGRVFIVDHIDHALALAKKYRYSLRIVTLEGESLNPGGSLSGGAYKNTGNLLGRHREMEELQKHVETLRKEGASLKQQINQLQSDKDSNKAAMEKNTAEESRLTLHQNTVRLRLKQVDESRGEHAKSIQDINRETAQIKTQQEQIRQFRQQLTVQMDELEAKKKNAEELVTSLTAKLEEISEQEKNFNSQTADMRIHYANQVQKKSFIRKSMDQNRSEIRHLQEKLADYRAQKAVFGSEKDAIRRQIDETEAQIAALTEEMTKSQAVLRQKTDERSKYAAEHKTFFAKREELSETISQLDKEQFRLGSQKEKLEESRSQLSSYMWEEYGLTYQTARELSDDALQALPLAKLKKMTADVKGQIKALGNVNVNAIEEYKAVAERYETMKTQHDDMVEAEEKLAGIIEDLNSSMQKQFKEKFMQIQKEFDRIFKLLFGGGKGTLELADPENLLETGVIITAQPPGKKLQNMMQLSGGEKALTAIALLFAIQSLKPSPFCLLDEIEAALDDANVKRFAEYLHNLTKDTQFIVITHRRGTMNTADILYGITMQEKGVSTLVSVNLIENELGKMSEEKKGFFSRLVEGLTKTRNNIMSGFDAIFSGFSNIDEDFYEELEEVLVMADLGIHTTENIIEELKRKVKEQHIKEPQACKQLLADTIKEQMRVDEEAYQFEHQTSVVLVIGVNGVGKTTTIGKLAGQYKKAGKKVVLAAADTFRAAAIEQLTEWAHRAGVDIIAGQEGSDPASVIYDAIAAAKARKADILLCDTAGRLHNKKNLMEELKKINRIIEREYPEAYRENLIVLDGTTGQNALVQAKQFKETADITGIVLTKLDGTAKGGIAIAIQAELGVPVKYIGIGEKIEDLQKFDTDAFVDALFTPAEENMSRMRNVLEYLEQSAERFPEKSAVTDGICTYTYKELLAYSRKIGSGIAAYCRSEQPVAVLAEKGADTLAAFLGIIQAGCFYVLMNPELPIGRLEQVQQVLQAAYIVTDREHREMALQIVPEHQILWMEELMETDENQTLLSERRKRAIDTAPLYANFTSGSTGQPKGVVVSHRSVLDFIDVFTELFGITSEDRIANQAPFDFDVSVKDIYSSLKTGATLVIVPKQLFSQPAPLLDYLCDHEVTVMIWAVSALCLISIFHGLDYKVPAKVRKVLFSGEVMPPKHLKAWMDHLPEADFINLYGPTEITCNCTYHRIDRNRDYSEGVPVGKAFPNEHVFLLDEQDHEITEPDKAGEICVRGTALALGYYRMPEQTAEHFVQNPLNHCYPELIYRTGDLGRYNEYGEILFGGRKDYQIKYMGHRIELEEIERAMEDIEGISRACCIFDEKKLKLYGFYVGEIEKKELHHRMSSSLPPFMVPGALRKVEQMPLTKNGKTDRKALMEKHAKGARAMTDEQMMALAQTYQTPMHIFDMAILKKRVAFLKSHLPEEVSLCYAVKANTFIIKELCGQVERFEVCSPGELAICRRLQIPMRQVVLSGVYKTPAVMEALFRDGVDIGIFTAESMEQYLLLAGLAERYTMKIRLLLRLTSGNQFGMDENVLIQTIRMSRSNEWVEVEGIQFFSGTQKTSVKKLRRELTYVDAVIQRLETEEGFRVKELEFGPGLPVFYFQGDDFDEVSFLAEFSEMLSEMTSQVKLTFELGRSIAASCGTYMTSVVDAKVNKKQNYAIVDGGIHQLVYYGQSMAMKHPYCHVLPEKQEGETMDWNLFGSLCTVNDILVKQMPVRNLTVGDVIVFENTGAYSTTEGIALFLSRDLPKILLRKEDGEIHVLRDSIDTDPLNTPNYHEMMKEQIIEILEDIQPEADYETCQTLIDDHILTSLDVLSLVAELEDEFDVTIPTVEIIPSNFNSVDAIAAMVDRLQEEGMKSYVAPLYLLVFLPAVVFLYNIVPKKLRPVVLLLASYLFFWSISGKLILFLLISTFSIHHFGLWLSSLQEERNRILAETERPKRKAVKAEYIRRQRWVIFLAVCIHIGTLLVLKYTAFFGQNLNSLLALAGVDWTWKIPKMVMPIGISFYTMQAMSYILDVYRETLKPDKNIGRLALYMAFFPSMMEGPICRYNDDAVSLWEGRRSSVQNLVFGAERILYGVMKKMVIADRLNIMIKTLYSGYADYDGGMMVVAAIAYTCQLYMEFSGTMDVVIGSAELFGIVLPENFKRPFFSKSISEFWTRWHITLGTWFRDYIFYPISMSKPMKRLTSKARKKIGNHFGPLIAGSIALFVVWLFNGLWHGAGWHYICFGMYHFVLIASANAVEPYTKKLLEKLHIRREEGGYKCFRIVRTALLVCIGELIFRAGSLRIAMRMLKKMFTDFNFKSFTDGTLLNLGMDKYDFLIVAVSVLIVLVISIANERGICIRQKLAEKKVVVRWAVVYGLILFCIIFGAYGMNYTPVDPIYAGFMKRYLKTALRFILFCVIFMVILMLLSKVFVPKDNQKSAGMEAVQSNGILGEPDNTMDYLVVGDSETYSSITPMEIWRQYGYAGYVCGTGGQHLYDTERFLAQALKKQSPKYVILETNALYRKTAYEKVLKSQLEKYFQIFRYHDRWKSLTINDFTGSVNYTWTNDYKGYRYENKVASAALKDYMKQTDQKAKISAINQYYVEQMIKLCRKNNVELILVSTPSIKNWNYAKHNGIQTLADQYGLEYYDLNLMPDQVKIDWKKDTRDKGDHLNHTGAVQVSDWLGAFFHSKNTLTDHRQETAYSQWNDALGRYDQQIADGTANEISHCKKMGYNILLVADDRETKELLMLHLNSNGFTVDIAENEEMFNVCFGHQKANLILIDMMMKSLNIYELIRVIRLKSNLPIILIADKENDANRILGLNLGADACVIKPYNPLEVIAEVQAMLRRYYELGCGGRIPGETMVLRVGELVLDTEAFVLRKNGNVLSLTSAELKILAKLMRSPKRVFTKTQLCECINGRYYENDDRTMMVHISNIRAKIEDDPANPKYIKTVRGFGYKIDSDDMEKFIEEALLYDFYGELLTEHQKLIYEDFVLNDLSLSEIAEDREISRQGVYDIVRRCRKQLQGYEAKLHLVAKFIHTKERVAEINHYANEILEHQEDHQRMIECINRIEMLSNTIVEELMAFESLSDKLQNVFKNLRSKGRLTEADVKASLKEVKMALLEADVNFKVVKQFINSVTERAVGQDVMNSLTPGQMVIKIVNEEMVALMGSETTEIKLNNSNELTVIMMAGLQGAGKTTTSAKIAGKLKAKGRKPLLVACDVYRPAAIKQLQVNGEKQGVPVFSMGDHQNPVDIAKAAIEHAKNNDLNVVILDTAGRLHVDETMMEELANIQKAIKVDQTIFVVDAMTGQDAVNVAKSFNEQIELDGVILTKMDGDTRGGAALSIRAVTGKPILYVGMGEKLSDLEQFYPDRMASRILGMGDILTLIDKAQSQIDEDKARELNQKIKKATFGYDDLLESLNQVKNMGGITDMLSMLPGVGSQLKNVEVDDSQFSRIEAIILSMTPQERANPDLINPSRKKRIAQGAGVDLSEVNKLAKMLEQMKKMMKQFGGNLPKAGKRGKFKFPFSIMAVKIRLRRMGQKKAPFYRIIVADSRSPRDGKFIEEIGYYNPNVEPSDVKVNEELAQKWLSTGAQPTEIVSRLFKNAGIIKMKELVEVIATSLVDHPEEVVVTETVTDKSIVLELKVAPDDMGKVIGKQGRIAKAIRTVVKSAASKDDKKVIVEILQMFWKGFGLSEYAAAFCVIDDLIEISHGIIFGNFPVLYIKEGKRWKNICAMEKYLRVGVISSSHGVRGEAKVFPTTDDVQRFKKLKTCILDTGREYKELHIESVKFFKQMVILKFKEIASIDEVMQYKGKDLLVTRDQAVKLEENEYFICDLIGLKVVTDEGEDFGVLTDVIQTGANDVYAVKCPNGKEVLLPVIDECILDVDLERQQVTAHIMPGLVDMDFHVMTLFPDMIMQGLSDSVIGRAVRKGTIGLHTVNIRDYSLDKHKHVDDYPYGGGAGMVMQPEPIYACYQDIVGKMDKKPRVIYMTPQGRVFSQEIAEELSKEESLIFLCGHYEGIDERVLDEIVTDHLSIGDYVLTGGELPAMVMIDTIARLVPGVLNNSESAEYDSFQDGLLEYPQYTRPEIWHDKQVPEVLLSGHHGNIEKWRRQQSLKRTFERRPELLEQEEVQEALTKKDREYLSELENPEDTLMKILKESKKIVKMTCISVNPMIKCNALVRKRITAVALMNDIIKSIEEAQLKSDITPFSVGDTVKVYAKVKEGNRERTQVFEGTVIKRQNGSNRETFTVRKSSNGIGVEKTWPLHSPIVEKIEVTRRGKVRRAKLFYLRDRVGKKAKVKELVKMRKVPLSKKQKRAEKIKKTLIHVGIWLLGLLIVIALGVFAVRGFGIKTVIIDQSMNPTLQNEDVVLLNKLSYKIGSPKRMDVVAVRIGASENSPTYVRRIIGLPGETVQIKDGKVYIDDTELELTFNDAAIENAGVAEKGETLGDNEYFVLCDDYNNNRDDSRLDSIGTIDSDQILGKVWLIRSPLSRLGLVHMNIQWYPGHMTKARRMMQEDIKLIDIVIELVDARLPLASKNPDIDDLAKGKARLILLNKSDMADPKYTKLWESYFKAKGFFVLQINARTGAGMKAVTGVVNEACKEKIERDRRRGIKNRPIRAMIVGIPNVGKSTFINSYAGKACTKTGNKPGVTKGKQWIKLNKNVELLDTPGILWPKFEDQAVGQKLAISGSIKDDILNITELAMKLADYMSKNYPGTMASRYGIEESDDSVKVLADIAIAKCCLMKGGEPNIDKAASMLIDDFRSLRLGKVTLEQPPQSEEEMIQEKIEIIRDKFKNASIEKLPELMITYREDGRIGVGKILERAQKKLDAYNKELDRVQKMLSYERQYGECGVSCGIDEAGRGPLAGPVVAAAVILDINCPILYVNDSKKLSEKKREELYDEIMEKAVSVGVGIASPETIDEINILQADYVAMREAVSQLTPKPEVFLNDAVTIPGIEGRQVPIIKGDAKSLSIAAASIIAKVTRDRMMREYDKLFPEYDFAKNKGYGTAEHVAALKTFGPTPIHRRSFISNFIMNHVEKGHYYEQEAADYLISCGYRILETNYRCRHAEIDLIAMDGDYLVFVEVKYRQSDRVQSPSEAVDGKKQRQISLAADQYLLKHKVSEEQLCRFDVVAFLKERPILYKNAFEYQGAKGWMVAVTGSGTTELKEKNHVPYIQFKNLSATGIVKHGFSTRKGGVSTGIFSSMNLNFKRGDDSDAVLENYRRMAAALNMRVEDMVLSDQAHTTNVRVITEEDRGKGILRPQDYSDVDGMITNVPGIVLVTSYADCVPLYFVDPVRKAIGLSHSGWKGTVGHIGQKTVEKMHEVYGSEPKDIVAAIGPSICQSCYEVSDDVAEAFRANFTADEAADILLDKGNGKYQLDLWKANWYVLTDAGILPEHLSVTDLCTACHPDLLWSHRKTNGQRGGLSAFLSLIDTSVMKKHLHVIQSIVPGSIAEEMELQPGDTVLAINGQDIEDVFDYHYLVNDEYIEMLIRTADGTEEVLEIEKDYDEDIGIVFESSLMDDYRSCSNNCIFCFIDQLPKGMRETMYFKDDDSRLSFLQGNYITMTNMKDEALERIIRYKLEPINVSVHTTNPELRCMMLHNRFAGKIMEQLQKLYEGGIIMNGQIVLCKNVNDGEELERSIRDLSGFIPNIESVSVVPVGLSDHREGLYPLEPFNREDARKVIACIEKWQKKLYEEYGTHFIHASDEWYLLAGYEMPEEERYDGYLQLENGVGMIRLLTEEFHEGLKEAVTDGKKRHVTIATGHSAVGTIRKLAEELCEKFPNVTVDVYEIVNHFFGEQITVSGLMTGTDLKEQLQGKDLGETLLLPVNILRSGEDVQILLDDITIPELENTLQIPISIVQSNGQDLVDKILGRGEIDEMSKPIVAIIGRPNVGKSTLFNALAGQQISIVKDTPGVTRDRIYADVNWLNTQFTMIDTGGIEPSTNDLILKSMREQAEIAIETADVIIFLTDVRQGVVDADFQVANMIRRSGKPVVLVVNKVDNFKTMMADVYEFYNLGLGDPMPISGNSKLGLGDMLDEVIKHFKPGTAEEEADERPHVAIVGKPNVGKSSLINKLTGENRVIVSNIAGTTRDAIDTVIKHNGKEYVFIDTAGLRRKSKIKEDIERYSIIRTVSAVERANVVVLMIDAKEGVTEQDAKIAGIAHERGKGMIIAVNKWDAIEKDDKTMNKFTKDVREKLAFMPYAEMLFISAETGQRLPKLFDTIDAVIENHAMRIGTGVLNEILSEAVAMKQPPSDKGRRLRLYYITQVSVKPPTFVIFINDKELTHFSYTRYIENQIRETFGFRGTPLHFIYRERKDKGMAIKVIICLVLGYIFGCFQTGYFYGKLFKGIDVRNYGSGNAGTTNTLRTLGKPAGYIVFLGDALKAVFAVWIVRYLLFPGLGDVTKILETVTALGVVIGHNYPFYMHFKGGKGIAATGGFMFALDVRIALIAAIVFAVVFFTTRYVSVGSLTITALFPILMLIFYPGQWVVFGLSLIFTALAWWRHRANIKRLMNGTENKFEKKKRMKNLLNALVSNTPKESISEHPFSSDERKRGEELLKQCPVHSYYMREFLVSGTMPFILVMSVYFLVRFVMYLLPSKSKGTFLFKAQWHFKKSWLIVPTVVLVVVYTGFGLWFSADKIADRGLERILQWCLLCLPILWVVLMFLPEKIYTNGVSDITHFDMWREIARVEPIGENAYKIVQRSGVKYKLYLHEGDRLPVNLTTPDDIVTEAFKHMDELRVYRDIQMRTGGEIYIGVVGPVRTGKSTFIKRFMDLMVLPGIDNVHEREQARDELPQSAAGRTIMTTEPKFIPKEAVSVHISDDIQVKIRLIDCVGFMVDGASGHMEDDKDRMVKTPWYEDPIPFTKAAHIGTQKVIRDHSTIGLVITTDGSFGEIAGESFAAAEEMAVGELKQIGKPFIVVVNTIRPYAMETQELCRRKEEKYDIKCLPFNCDQLKQEDIQKIMATMLLEFPVSQIDFYTPKWFDLLPEEGEVKTAVADTAREYLMNVRHLKDVRPMQEKLTCPYIKKCFIETVSMSDGKVIFHLEIDQKYYYELLSEWMGMPVKGDYAFYRILRQLSENQTAYSAVSQAVESARAKGYGVVAPEKEEVLLEPPVLIKHGSRYGFKIKAKAPSIHMIKAGIETEIAPIVGDQAQAEELITSMNNSQEQDPKAIWDTLIFGKTVGQLVEEGIQTKVTRMSENSQVKMQEAIQKIVNDGNGSVIFIIIMSKKGYSRPGLFGGINHYDANGRKVGESRPSLFGGMNDYDASGRKVGESRRGIFGSVNHYDSKGHKVGESRPGIFGGVNHYDNKGQKKGHSNPGFFGGMNHYDDMADRKLIEEVGKYIDRYYEPARDDIKIDKEMLSVFEKITRLREKRAEERNQQENIVRESCEIDESAAEQFDISTMQKTKITHGMSSAMPMNRNIDDLMNQLEETFSQRLLRMIDERGMTDSEAYTKAHVDRRHFSKIRKDIHYAPNKKTVLAFTIALELSLDEAKDLLRSAGFALSRSSKTDIIVAYFLQHKIYDMFEINDVLYAYGQPIFEMNAELTELIFILDRSGSMGGLEADTIKGFNHMIAQQKEQGKKVNVTTILFDDEVDIIHDRFPVEIIEPLTEKEYYVRGCTALLDAVGTAIEKTDNVQKHLPETHRAGKVIVVITTDGLENSSEHYTQEQVRRMIEARKECGWEFLFLGANIDAGKEAEKIGIARNRSVTYENDSRGVELNFKAVGRAVSKAAAAAAVTDFIEDDWADEIQTYKKGRKMEDVRREERCEYLFLDIEWNQVPGTVGIGGREPVQIAAVAADGELQIIKTFSKAIRLSNPALLNEKTMKVSHMSTLNVMQGLPEESVLMNFFKSFPIYPCIVVWTRDTYDLLRHDMKKYKMTVKSHQVVILQDVIGVIMGRMNGKIGFKKALECVGVEYEPNYLHYAKHDAAYLHQLFRSMYRQYGEMTDEEYCIANLETGKLHTEGCQYIRRMQQGKMVLKPKTVVFQGFVPCKVCGDNQTWKRLNIELKRKQKSCGRRKNRLKSLPLTDENIEAICQHFRVVYSITDHVVFVRTSIAGWIIYLDGDRVTKLFHENYRMNNSVYSKKQKLKCTEGYHKQKLPSENFYNVISYIKSHDSGIVRKISKKSRLEKLFEKVEMEMQMNIIENMAVSYNGLWKLLIDKNMKKMDLMNRVQISSSTVAKMTNGELVSMKVLEKICAELGCDFGDIVHYEKDRKDGEQMEYSAGLTSKLFWLQESRKTASYILDGYSKTDIRKIAWEKNIYQVKAEYRAYEVLNGTYRRVSALPEAVLQAFITCDVETVKILNLIAILMDSRLFFEFLHEVYDEKIRLGEKVITDRDLNVFFADKAMQSDVVAGWTDTAVRKLKQCFTRMMFEAGLLESSAKPRTIKPIHIDYRTEELLTANGLGEYLKAVKGVMARLSLEERLNRIEDKISEKSFRENKGLGNEVGYYVFDYDPRAELEVRNHIAYLKDRINNGNKDFKIIEFDLFHTMIQVLEEEGYLEAFFDLEKDNGFFDMADSLVETLGLDETNELNLIISKILQEDLTDSVIFLTGVGKCHPIIASHNILNNLHQVLDSVPVVMFYPGEYSGQDLKLFGTMDSHNYYRAFRLVMQIKDMFEKKIDRDIKGVIKVGQSDEENVYQELDEYVVTKELLKHFRDFFDNYEKGINGSTDKMGVWISGFFGSGKSHFLKILSYLLKNSVVEGKKAIEYFTDGKKIDDPMLIAKMTNSGTISSDVMLFNIDSKGSAKVGSGKEAIVEVFMKVFNEMQGYCGSIPYLAEFERQLDNEGRFEEFKEKFEEIAGAPWEKKRQAFAVIQDKIVKTIVAMDFMSEEAARNWCKNAKGSYDLSIEKFVSLVKEYCEKKGPNHHVIFLVDEIGQYIADDTQLMLNLQTIVEDLGTACRGKAWVIVTSQEDIDSITKTKGNDFSKIQGRFDTRLSLSASNVDEVIRKRILEKNEISESALKLLYEQKESIIKNLITFTADTADKKLYTDKTDFADCYPFIPYQFNLLGQVLTAVRTHGASGKHLSDQSRSMLALFQESAVRLKDSQEGVLVPFSYFYDPLHKFIDHQHSQVITDAEDNSRLDEFDVELLKVLFMIKYVKEIKANVDNLTTLMISNIDDDRIELRKKIEESLKKLIHETLVQKNGEIYIFLTNEEQEINNAIKNESVEMGEIIGEASTVIFEEILPEKKYRYSSRYLFPFNQKVDDRYYKNNQSNDIGLTIITPYGEEYSDSALRMLSSQGHAVIVKLPNDSTFLDEITESIKIYKFLNKNASGDKGSFDSIRRAKEDERIEKKERIRIFIEDALKHADIYVNGDKAVIAAKEPVNRISEALGKLVSMQYNKLTYMETAPEVSDIMGIFDDNGGQLTFLGTSDTTPNKLALEDVIQVIGLNNARRMMTSLKALQDKFGAAPYGFDPKDVQWLVAMLFKMGRVSLTYSSQNLSLLSNKKEELVRYLTKREFAEKLLIDIRERATDGQIRSAKEVMKDYFGFTLSSDDDDTIMKSFKNKAQDKLKLFDDLMIEYRINPKLPCKPVIEQAKKNLEDILTIKEPAEFFKIVDKNRDDLLDDADDTAPVFDFFKSGQKKIFERALEQIQILENSKVYVRDQEIIDNVAQMEAIVKAKKPFGKIQNLPDMSMKFVQQYGTLLEKEADAMRPIVDDDLKKVLSVLDSKTFAEVFRDRMIQAFEELQQKLETSQEIAAVKNIRLESDTVKLRCLDEITEYEEAHQPKPDLEPPTVPATPKMGKDGETPIKPVTPPVQPKLKKRKNISISNVAGARTYSIENEQDIDKFLAEMKQKLLQELEENTIIILSMNKNAIKKFAIAARRRLIDSVTDRAGMIGITAEGISEPVTKGAGFEVYKTSAGTEITLTLEQCDQRRQLKKQIESRGFGAVVEEVAYTWFNRICAIRFMEVNDYLPNRVRVLSSEKDGKMEPDIVTRALEAELDLAEKDRQAIIDLKMSGQPEDADKLYRMLFLKECHLLNEILPELFKADEDSDYMEILFGISYANKDDVIYMLVNQDTGIPEVDFNVSAEDEEGNLIGQVEIIGWLYQYYNTELKDDTFAKLKKNIKITKERIPAATQLFTPDWIVRYMVENSVGKIWIEHLRAIHPDTDEKAIAESFGWKYYLPEAEQEEAVNVKLAEIRTTYKDLKPTDITCIDPCMGSGHILIAMFDVLMDIYESAGYDKREAAFEIVENNIHGLDIDQRAYQLSYFAVMMKGRGYNRRFLRDRDRKPEPKVYAIEESNDIDRSHLQFFGNHLSEKERSLVVTQMESALDTFIDAKEYGSILNVEACDWNLLERFVEDYESERQIGFDDMGSDKTQDSLRRLIKVAKNLGQKYDAVVTNPPYMGASGMGTDLSKYVKKYYPDSKSDLFAVFIEKCGQMTKKNAYQAMITQHAWMFLSSFEKLRNKLQLSDIVNMTHLGPRAFEEIGGEVVQTTSFVIRKSHIEKFKGTYCRLVEPTTQQGKDEMFLDDENRYFAEQDNFSKIPGSPVAYWIEDKFLKCFDEKKVSYYGDALEGIKTGDNDRFLRIWYEVDNTYISLLDENMDNSIKWVFTTKGGIFRKWYGNIEYVMYWKNNGQEICNYPGSSFYQKRNIFRPATTWTYLTSGKMSFRYLGKGYFYNNKGPAVFCDTQKDAMLLTGFLNSNVANYIQRFINPTLTVLPGNIRNIPCILPENDDIFQRLIGENIKLSEQDWNSSETSWNFKYHPLLNKADSIAEAFEKWSDECDTQWKKLKYNEEELNRIFIDIYGLQDELSPEVEEKDITVRKADLQRDIRSFVSYAVGCMFGRYSLDEEGLIYAGGEWDSSRYKTFMPDEDNCIPITDEEYFFDDIVGYLVEFVKTVYGADTLEENLDFIAKALGNKGDTSREVIRNYFLKDFYADHLKVYQKRPIYWLFDSGKENGFKALIYMHRYDADTVGRVRTDYLHRAQKYVETAMQSAQYTIDNASSASEKSKARKAVTKYTKQLAEMKIYDEAISHIANKRIEIDLDDGVKVNYAKFQGVEVAQEGKKALKVDLLTKIKMSYKIEELQLKNFGMIENFNCNQFSNINLIIGENGTGKTFLLKALYSAVKALEEYKRGDDITPINDILSEKLRWTFQVEKLGDIVSKSAEEGLEFRMKLDKMALNYQFSKSASSKVGMVEPIENGKEGNSIFIPAKEVLSLFSVILKSREIDKSFGFDDTYYDLAKALRISPSRGRNYTVFANSRKVVGDVIDGKVEYDENSGKWYYKNKKNQKFSIGATSEGVKKIAIMDRLLANGYLNTNSIIFIDEIESALHPKAVCQFLDMIDNIANEMGLQVFITSHSYFVIKKLFLIALKKENTVKCISLNKGKEAEICDLHDGMPDNSIIDTSIQLYEQEIEEVLMGVIIPESDMEFGVYKEEQIFCIEKCRQYTEKLRQRGVRCCEFILLRSNKLCFIEAKRSYPDPIGGIAKDEKQYYTDIKEIAEKMRHSLQLYANIVLNRYSQDGVSEGMKNAESLEIRLILVIKNADKSWIVPLQDVFRKELNAEMRIWKVPDFIILNEEMARKKHFIVMKVWHITSDVGYGGHLLYNLTNNAKKVPEPLPWIDPSINCLYKEAVLSFMVGNYESALIDLCLLLEHVLRAAILNDEDSGMQRTDTASQLNKYGSLSETIKEAENTHLMDGCDKDWWDAVSRVIRNKSAHYVLPVLLKRCAKEEKLRKYINKYELPENNSEYWYESHLINWGSFYHGAGEELVEGFLQDATRELKIVIGNTKWKGDESWWISLKAQYDSFFSYKWDIEKLKYSFENAVKDFGSIGKMNYLEHKTLVKYGDGLLAHSQEWQWLIDEIEARFEIKEIGSWQQYLSGYGPIRDVFEYFVKVLKVCDKSWIYSRKEFEEIWEIAKFYIGIIDVRECMEKISHNQCKVFLFCIWLTKLENGDNECEYLLDMRLLNQRNYFELIKCDSLLEHEQELLDYAHTIAVAGLDIPLKYLCDNLNQIEYPCNTEFLLNYKKEILNYNAFSFQNIAREACQTWQEVYLLDMLNVSLNKRNIQPMYTDTNVSFPDISGWSKDVLNAVKRYFNHSITNFAVESVAYVKFNIEPSKEVKLLHCKLLMEAIESGVESYKILSSSSYHILSYLFCDKLMGDCNKEEACINLIKRIQKWENPAWIINLKKDGYPISKEQRNLLSEFLANKYKQIDNVLSLYDLKNYLEDKTTANAITTEYLRKVSKKFESYTEEEAGILVAAVYYEYMLYLIEVNQSNTNIDKRYVQKEMIHIQKIWQEKIYKKQCGNLHEFSHEQKIGTKELEKFSDVALLNPVIFAKNCTPSSEDEILNIMMSISENPLLHLFKGMTLTPVFPMERDKIVYERHDIDKILQQYVNDLKNRKGYKLLNQLDSKIFVAGIHARYKFNTQCSMTFFIKEEKLYNEVKKECSIELLPYTNIESLALLTQLFPVLEMKIRELATLFGIFPFKKKSNEFMQYNDPSSLLRELIEMLFEEQHSFESVPDLIYVYNIMYNSNSYNVRNECIHGRDYLSGGSFRFAFRATLFAVHMIDFRIKTIRNNVSDIIELEEMDLQNIQEQLNTEFSKSDTRIIFWFDDKGEYEDEISELQLEHATLHILNGTNWFYSKWLLNEFDTEGKYLVYAPFPKPSDAENPLADMYYYSKPYYTDRVSQMLQELGFDSRFKAYLEQYSNFWKSKVRIERFEELGIDHFNVENIDIGLIAVLTDVKTPNFEEIIRKLILNDSKDYVAALEENHLQEKFWELCSKYFGYQSENPKIEDLAACMLMTYAASALRDTLPKVFESYILAKRNDVIVFVRNLMDNVLYQEAYDTLADKVDKALKVSSRVKDELKRYADKKNNPNGQLMQLRDIAECDTFCGFDEILIDWALEQLNDEILDAQIDGMNIAEIAEKRISKSYHFGTAYKKEYQAIKFAYQMMKAVSVLEVSSDIKEIAAEYQERIYLIDSYYRWFYNAYDCIEDNERFSQVRERIENMYSFTYLQRITPKWNQGLTGDLLVASGLRRQEDFYRNYLKVYEGKQRVIVIISDAFRYECAKELMETLELDERCTPKLEAMIGSLPSITSVGMASLLPHENMQVDENLNVTMDGQPCGDLVSRDKILKVQNENNMALSFDEIASANKERTKELLQKKNIVYIYHNQIDARGDKAASENEVFNACAEAVKEIHKLVRKLTMTVSAAKFFITADHGFLYKRDRLQEFDKVSYTKEFCTCANKRFLITREQMNDMGMMSRQISYMNMLYVTTPIGADIFKVPGGGQNYVHGGSSLQEMLIPVVELTMNSRAVAYDYVDVVLTSTTRKVTNLITFFDFIQTEKVTDTMKARSLVAYFTTEEGEKISFDVPIVANSREEAPEKRTFHEKFTLKSREYKYGDKYYLVLADANDEKNILQQYEFMIDIAFVDDFGFMRFNKHQRDIIKAIKNKEVYDIESFVKKFNLYEHFVVDKEKIKKAFDESELGKEYPVYVSKNVLDLKNKREISVPARLEYMDNKKKVTFDNCCYEYDLWDEKGFNIAINYDEIVGFISLWEYLKRELDVFEIEKTVSRSEIELFFRKYEKTTNKSNSTNDYIPIVQEELFQLTDGKFQRKVGEVDYNVVRRNAYNYVEEDVEIDNEQLKIFSVYLHKKILPTPSLTKYVSNRYQTEDEKATRLSLRIAIISIIIAIFSSSFSVYAAFKIDPSNDNLKIIQEKLDTIENSIRDDMDNKTKIEIRLSKMDEFSNSQANETEDKREAIKQKLRQYYDGRIVRKDLTKSIREGANVPVYVLEYLLGQYCNSDDEEIIAEGVENVKRILRDNYVRPDEAQKILSLLRERGSYTVIDRITVILNTKEDRYEATFSNLGVKGIPIHPDYVKDYDRLLCGGIWCILQMEYEFIEEDKKNTQPIRIRKLTPIQMPHVDMDEVRNGRKAFTKDEWMDIILRSTGLEPDQFSERAKWLLIARMIPLVENNFNLCELGPRSTGKSYIYEQISPNSILVAGGQTTVANLFYNMSNHTVGLVGMWDCVAFDEVAGIKFKDKDGIQIMKGYMASGAFSRGKAEIQAKASMVFVGNINEEVDVLLKTSSLFDPFPPEMGTDTAFLDRMHCYIPGWEIPKYRPNSFTEDYGFITDYLSEFMRELRKDNYSNLLDKYFHLGNNLNQRDTIAVRKMVSGFIKLLYPDGEVSKEELREIVEISLELRRRVKEQLKKIGGMEFYDVNFSYRDNDSFEEHYVSVPEQGGSKLIPEGMSNPGCVYTVSRTKTGMIGCYKLETQMMPGNGKLTCMGIGSGKEQKEATNTAFNYLKAHSNEISGHISTTTKDYIINYQDMQGIGMTKNLAMSTLVAICSAALSKSVVSGLVVLGEFSIGGTLLKVEDLASTLQVCVDSGAKKVLMPMVSAADIGGVPADLIGALGLNFYSSPEDAVFKALGVEMKNLGEIVIRDRALKNESDAIVVQYIYSLIRNKELSRITLNKSFRDAKKELENAHIEIDAMICDESVIRQVLKSKAEKYIADRKNVILLREKCKNLPSLSEINSLDFTDRVHLILQAHRYYKYVQLDEMLFEEENIVIYLDTWIEQFWNGTVNLRKIKSNLRPVFHRMFGQEGKYFYGLHFKRNKSLDGYVLSLLASCGKGDNKNKKYKALTEFFARVLYEGGSIYEVKNGLNKMDPVEIGVEDFVVRCNVFRCMNKSHEIKDMIGLIKICDENGQNHLMKVPVGYCSECKVYFILNTTYYQLIKNGDILCKIIDEKTYLKSDGLQRARLALQSVLMQYGYNVSQNDGLTDEHRQRILAFIIDNNILSKSEIISYLNFFISQKQKMDNMKWAIMKWNRDREFVEKYKNDEGIKVKIGAIQKQRRMLRQHQASLDDKKKFTALVKDLFPAQAKNVNLLLMAYNMGIAQDIRKATYINNTFAFRYVKQLMDDFGMSRVNADWIVSVWCDCYGHKVLGKVCDISAQKQGKGPAIQGEQTLSGKSYGDLFEYTKSGYGNGLAVTGFRGEKNQTIIFQNRFGNKPVIEIAAGSFESTQIEEAILTEGINRISEKAFANCNKLHQVVLPMSVEEIADNAFENCYHLKSISLPAMLKTIGIAAFKGTGLRTIDLPKSVYWIGEALMADCRDLERITIPDNINRISGSMFEGCTNLKKINLPDSLSEIGDRAFFGCSSLDFVVIPDSVQQIGQDAFTNTDKQFIIQCSFGTYAEEYARKNKIKYQLVMGFLDALFGNRNQIPTVITILPDAAKQEILAGRLPILNTDKLFLKRGEKIHFIDKAINLEEKKVKQYRHYGHSSPGLFKGTRWSSGQGRAIEHTELVQHRGILYISNQRIVFQASEWGFDKTYRYLTAITPYSNACEMQFGNKSYCLIVADGSIVNHVLQLIKQKRQVPMLNDQEREELFRPICQDMSGCLFDAYSGLKNENTCEQEWLVKCRANTVLFTLYHIASKRFISPDGAVYEMYLVKNSTEEERFKWVKHINGKDSAEKEGPFKDYIDGKCEINEVFDKISDDFSKGATEICEEDNRKRNSETAKTYSKISRIIACLRDYETYSDKKLNELTTELSDIINGLNQKSMINRFMTFYCKEIQKAYEHRDVERLGELQEDWRKHRNYVWSKIPEMEGQLRNGTLLTSESGNRYEVVSLLGAGGQGEVYDVQCNGRHYALKWYFKGSATARQKNILETIIAKGSPDASFLWPMELIVPAQGDLYGYIMPLRPKNYKSIVDLMKKRVNPSFYTLCRTAFNLTRGYQKLHAMGAKYQDISFGNLFFNPDNGDVLICDNDNVSFDNSKPGGVLGTPGFMAPEIVRGEKRPSKDTDRYSLSVLLFYLFMVNHPLEGKQEASIRCMDMAARVKLYGTNPIFIFDPNNKTNRPVKGIHDNAMIYWPLYPEKLRQMFTRAFTVGLDEPSKRITEPEWMSLFSNMMSGMLRCSCGAQLFYDDELEEKGIAHTCWNCGKTVPVPHKIIIGNNRVLLQPNTKLLHHHVYDDFDMDAVVGSLVQNPKNPALWGIRNEEQVNWTYQKADGTQIPVAPGRTAGIAKGVKIIFSQSTGEFKMELQRPGGELATRPIHFFWAVDCSGSMYGEKIGIVNNTIQECIPEMRSAADNNLNAQLLVRALQFSTGASWITTNPVPIEDYGWQDMEADGLTALGKAFDLLAAQLSIPPMPERALPPVIVLLSDGQPTDDYKTALDKLKKLPWFRKAVKIAISIGQDADDEVLIEFTGNKELVLQANNAATLAKMIKWASTTASMVSAPSSKPMNSMPAAVPAVSVQTSTSSAAAISASDPFAPANNGAPLVLDMSNIPDPDDFDEGAVWMKRYICEGIVKGATHVRNQMPCQDNKKIIKISDEITIIALADGHGSSKCPRSDRGSMIAVNSFYHIMKKYLEIYGEDEEDITHLMTFLNREGDVRFAQDVCEEWQARVKQSFYKNKVEGMTNEDGSIKWPSVFSLYGTTLLGMLITDSFVFSFQIGDGDISAVTKDAVEPLVEPEKFLGIETHSLSKSDAWRKAVASVHRLELDSQEPYMYMLSTDGFANSYTSDKEYQKTCIDYLKMLQEYGIDVVQANLKKWLTETSELGCGDDITVVMVYFSKEMIVDRYYYQQLNKQEQAIYKAFYQGVMKHKAIIPIPIKGTFSENDFRRIFLAMTRDNPLIYFLNQSACSLAKDGLGHIAICPQYFFSQEKIKAYNRKIEQVVNYLVKRLRLMQCDDYEKEIRVHNWICQNIQYDYEGTNKHKISRVIASHNILGVFAYHKAQCEGIAKAVKVLLNTVDVKCIVVTGNAVKDGVYILHASLQIKIIRVCQMSIAEKRKVDIKEIREWLSLIITLLSFVLSIMNSSSTTINNYAQQINNYYVVGMGYDAKELNMTKYRIVNRECSVRLKHDFSSIVIENLNEGQVVRIIDKYKKWRQIVWVNEGGEECMGWIQNYKLSEFKIPKNKWMAWGYERGFVIEHDNTLKRRISCKDCNYYDSSDKSCMKRPLYLPVDGYNSWRYCQYFELDGGVSHLEEKRTQYMRELTKRKKAQEQQQKTIISKSKPQKTTVTHDEPIKAKVMTKRLLNGVTFNVVETYPKGKKLNTKLISIIKSGGVRKKIMLRYDLEEKKIYVSNKTYTKEAINKTYQVLNEMILENMKKDMHTNQNHKTNYRIITALLLILWVAFIFSNSMDNADASTLKSGAVLALLRRILGSEGAALTEFIVRKTAHFTEFAIEGVLLFLVVKGYTTRPLWFLGWPLLAGLMTALTDETIQALFTGTIFSGDGCVDMNVTIYTDGAARGNPGPGGYGAVLEYIDPKNQLHVKELSAGYRRTTNNRMELLGVITALEALNRPCNVTLYSDSKYVVDAFNQHWVDGWVRKGWKRGKNEPVKNVDLWKRLLQAKAPHAVKFVWVKGHAGHPQNERCDELATYAADNGPLLEDTGAELMIQFPEKFQERMQQMLGDEEYAEFLKSYDLPFHNGLRINTGKTKPQELLQRMGVDLKQVPWNETGFYLENKKQFSKHPYYQGGLYYIQEASAMLPAKLVNAQPGEKILDMCAAPGGKSTAIGAALKGEGLLISNDISKSRAKALLRNLEGFGIINSIVVSEYPEKLSRYFPEFFDKVLIDAPCSGEGMFHKEPSMTESWLRMGPEEYHKFQMEILTYGAKMVRPGGKLIYSTCTFSPEEDEGSIAWFLQEHPNFHLVEVDDDKDLCGCHCIDHGHPEWADGNPELTKTRRLWPHHLEGEGHFAAVLCRDADSEPMGGKVTLASVPKLPAEMESFFQFLDTEGIHYPFDKKRLLVQNGYVQYIPEGMPELKGLHIMRSGWFLGELKKKRFEPSGAFARGLTPDVCDKVIAYPGDSEEVVRYLKCETLQVDPNLKNGWYLICVDEFALGWGKVSNGTLKNKYPSGWRLVMKTSFRLDKYLADMSVGTRSEVKNLIKKGLVTVNGEVIRKPEYKVDIEKDDLVCRGEPVVYQTMVYYMLNKPAGVISATNDPKQKTVLDLITDKSRKDLFPVGRLDKDTEGLLLITNDGDLAHQLLSPKKHVDKVYRARIEGQVTAEDAALFAKGLEIDDEDGAWRAMPAKLNILSSGPESEVEIIIREGKFHQIKRMFEAVDKKVVYLKRLSMGSLRLDETLALGEYRELTEDEVQALKESKGHTNDEEMKNDIERLLEGKEAVIFDVDGTLIDSMGVWEEVDRIYLTRHGKPMSEDLQRKLAGLSILQAADYFRNVIGIDDPPEKMLAEWNELAFEQYRHEIQMKPGAAKWLSLIEEKELPMAVATSNTRKLAMTALHAQDIEHYFRVIMTGEDVVKGKPDPFVYQEAARRLGVNPKNCLVFEDIPEGIQAGLSAGMTVCAVQDDFSDYQIEEKKKLAHYYINSFEDIFNNKVEVLAMMREFLPISRDDMKKRGWDELDFVYVIGDAYVDHPSFGPAIISRVLEAHGYKVGIISQPDWKNDQSVMALGVPRLGFLVSAGNMDSMVNHYTVSKKRRHQDAFTPGGVYGKRPDYAAVVYGNMIRRACPDKPIIVGGIEASLRRLGHYDYWSNKIRRSLLIESSADLLLYGMGERSIVEVADALDGGIEASDITWIAGSVFKSKTAEDFGEEAIMLPTFDEIAADKRKYAESFYIQYQNTDPFSGKRMIEKYGARMYVIQNPPAKPLSEQEMDDVYDLPYVRDYHPSYKALGGVPAIEEIKFSLVSNRGCFGGCSFCALTFHQGRIIQTRSHESIVKEAAALTKRKDFKGYIHDVGGPTANFRHPACKHQLKRGACPNKQCLFPKPCSQLQADHKDYVTLLRKLRALPGIKKVFIRSGIRFDYLLADKDKTFLKELCQYHISGQLKVAPEHVSDAVLDKMGKPHHEVYVDFTKQYKKMNQRLGMDQYLVPYLMSSHPGSELKDAVTLAEYIRDLGYMPEQVQDFYPTPSTLSTCMYYTGLDPRTMTPVYVPKDPHEKDMQRALIQYRDPKNYQLVKEALIKAGREDLIGFDSRCLIPPRPMQYGYGKAPAQNRNVRTNNAKNNSSRNGKFSSRNNSRKRTTENISRNTSTNRKKGSQSEKAHRRHEMKKLIVGTNESGQRLDKYLGKTLSEAPKSFIYKMLRKKNITLNDKKADGSEKLNVGDTVTFWLSDETFDKFKGVVENMSAKRLPKPEIIYEDNQIIIMNKAPGVLSQKAAPEDVSINEMMIGWLLESGQLTKEMLQTFHPSVCNRLDRNTSGLITGGKTLAALQFLSEGFRDRTIHKYYFCIVAGKVTEKVRLHGYLHKDEASNQVTITKEARHQADYIETEYEPLAEGKNCTLLKVFLITGRTHQIRAHLASVGHPIIGDYKYGSPEMNMAFKKEYGIKRQLLHAAILKMPKCQSPFDNLSGKIFTAPLPKDFVRVMMGEGICFKKEWMSMPTWNSRGLRGSLLEELINRTNEKYREQHLALIQKIPTPITPVRMDQETRRITLAYFEHRSTVDYIGAVQGIPVCFDAKECRTSNFPIQNIHEHQVVFMRDFEAQGGVAFLILYFTSADRYFYLPYEQLAVFWNRSKTGHAKHFKIEELDTQYELTCNGCYIHYLEAIQKDLDTREFMDSLLHTPEGVRDIYNEECSKKNALSAKLDRILKLYGYKDIQTPTFEFFDIFNRERGSVPSRNMYKFIDRDGSTLVLRPDITPSIARAVAKYFKEETIPLRFSYCGNTFINNSSLQGKMKETTQLGAELIGDRDIEGDAEVVALAIHLLLESGLTDFQLDIGHVGIFKALVAEAGMDEETVSQLRVLIESKNYFGVEALVEKLTLSDETAKLLLKLPELFGSGDIIAEARSMTCNAEALKALDEIEKLCQLIAEYGFEKYITIDLGMLTEYDYYTGMIFRGYTYGTGDAVVKGGRYDHLIGQFGKDAASVGFAVVLDELMLALSRQKIDIPTNEEATMVLYEPEYRSTAIRTANALRNVNQAVSMMKKETDKSLDDYKAYSRRYHIAHILYVDQDKELTKIDISDDSVLKMPVPEFMKYLTFALAKGRLAKKSLALFEQIGISMDEMKDPDTRKLIFVNEDLKIKMFLAKASDVPTYVEYGAADIGVVGKDTLLEEGRRLYEVLDLGFGKCRMCVCGPKSAAEYLQHQELIRVASKYPNIAKDYFYNKKHQTVEIIKLHGSVELAPIVGLSEVIVDIVETGTTLKENGLEVLEEICPLSARVVVNQVSMKMENERIMKLIRDIKTVIMKITKVTEDAVATLLDDLLKRSPNNYTGYADKVQAIIDDVRERGDEALFEMTKRFDGAELNADNIRVTQAEIDEAYTLVDASLIEVIRKAMTNIRVYHEKQRQYGWFDTTPDGTILGQKVTPLQSTGVYVPGGKAAYPSSVLMNVIPAKVAGVEKIVMVTPPGKDGKVNPGTLVAANEAGADEIYKVGGAQAIAALAFGTASVPKVDKIVGPGNIYVALAKKAVYGYVSIDSIAGPSEILVIADETANPRYVAADLLSQAEHDELASAILVTTSEKLAGEVQKEIEGFTQVLSRKAIIEKSLENYGHILIASSIDEAVEIANAIASEHLEIVTANPFEVMTKIRNAGAIFIGENSSEPLGDYFAGPNHILPTNGTAKFFSPLSVDDFVKKSSIIYYSREALAAKKDDIIQFAKAESLTAHANSIAVRFEDKMDRTASISRTTSETDIAVTLNLDGSGRSDIDTGIGFFDHMLRSFAKHGFFDLTVHVKGDLEVDCHHTIEDTGIVLGEAIKKALDDKKGIRRYGSFALPMDETLVLTALDLSGRPYLCFDADFTVDKVGEFDTEMVREFFYAISYSSGMNLHIRQLAGQNNHHIIEAIFKSFAKALDEAVGYDPRITDVLSTKGTLMRIYPAIHISDGRCINELPDGITRGRILTSQPLEMARRWQDQGAECLHVVDLDGADSGTSVNGTVIREILENVHIPVQVGGGIRSIKDIDQYMNIGVHRVVIGTQAIENPVLIKEAVHLFGSDKILVSIDAKDGLIATEGRKKFSHYNATTVASNMKAMGIESVIYTDILRRGLYNGAGIMQAREIAQKLHMKVIYSGGIVTLKDIEAFTDMPMEGIIIGRALYESRLKLSEAIEVCRWHERSIMEVKSIYPIINFSDEDEIAVQYERLGADGVIIISPDFSDEAMLIKKIRNICEKSDCRLYIWQPYRRLEDIKKVLYAGAAGAWIEATEQTLIREAADRFGADRVGMVISEPKLAADEFKLAKELNLTNIFVTGTIEKLPETVGNQKVIATCRYENKEGQKHLLADANVSAIALIYENETAALPNIHAMKAALETDSVKFNLFRSSLPFSSFKLNEDGLIPVIVQDFRTAEILMMAYMNEEAYEQTLREGMMTYWSRSRQELWRKGDTSGHYQYVKSLDIDCDRDTILAKVEQIGAACHTGHRSCFYTNLASKAYDGRNPMTVFDDVMATILERKENPKEGSYTNYLFDQGIDKILKKVGEEAAEIIIAAKNPDSDEVKYEICDFLYHMMVLMAEREVSWKDITKELAERHMLTAFATYLGKFVFFIAVAAAGFTAGKKFKASKKAKNSATAEMERPYSLNELRKMFLEFFESKGHLAMKSFSLIPHNDNSLLLINSGMAPLKPYFTGAEIPPRRRVTTCQKCIRTGDLENVGKTARHGTFFEMLGNFSFGDYFKHEAIAWSWEFLTQVVGLDPDRLYPSIYQDDDEAFDIWNKEIGIAPERIFRFGKEDNFWEHGAGPCGPCSEIYYDRGEKYGCGKPGCTVGCDCDRYMEVWNNVFSQFNNDGHNHYTDLIQKNIDTGMGLERLAVVVQDVDSIFDVDTIQALRNKVCDLAGVKYLEKHETDVSIRIITDHIRSATFMISDGIMPSNEGRGYVLRRLIRRAARHGRLLGIEGKFLAKLSETVIETSKDGYPELEEKKEFIFNVLTQEEDKFNKTIDQGLSILNEMEEKLSAEGKKVLDGADAFKLYDTYGFPMDLTKEILEEKGYDIDEEGFTVCMQEQRQKARDARKVSNYMGKDATVYDEIDPSVTSVFVGYEKTECESPITVLTTETELTDALTDGQTGTIFTQETPFYATSGGQMADTGVITGPEGTFEVKDVVKLLGGKIGHIGVVTSGMFKKGDVVKLAINKEQRSDTAKNHSATHLLQKALRIVLGSHVEQAGSFNNQDKLRFDFTHFSALTQEELDRVEAIVNEEIAKGLPVLTKVMNIEDAKKTGAMALFGEKYSDDVRVVSMGDFSKELCGGTHTDNTASIAAFKIISETGVAAGVRRIEALTGNGVFKYYKEVEKELHEAAKAAKCDPAQLVKRIEGLHEEIKTLTAENNQLKNKMAKDAMGDVMNQVKDVNGVSFLPVHVKDIDMQELMNLGDQLKAKLGDGVILLASENGGKVSLLVMATDGAMKKGAHAGNLIKAVAKLVGGGGGGRPNMAQAGGKNPAGINQALEAGAEELAKQLHMKEVKKLLVVLVAAVFFIGLFVLCDKYSENVKADYASQINPSIVNQGSSGTGSKGQTVDAGQLSVEKMVQNMVTKDYSASVTLAAAGDILCQQSVLEKAYNSDSEKFDFSDDFQYVKDLFLTSDYAVATLKTTLAGKYNGSSDEYYGYTTEDSNYNSPEVLADNLKSAGISLVNIATNHALDSDAAGLVSTIGYLDQAGLVHVGAAATADGSTDYTQNVGGVNIGFIGYTNSSNGYSLDSDAECVLNTLNDYDAQSIETLCNRVSAMKDETDLVVVMLNFGSVESDSIETDQQALAQKLCDAGADLILGTGSRVMKPVEKLSSEDETGQSTRSCLVLYGMGALLSGETYASSEKDTDISAVFDFNIARNAFGETVIQSFTVTPVYLNWYNDAIQPIPVCEAKDTDKYAEMLDDNAMDRINSAYEGTITHLLDGSGLTSTYENYAYHVSLQMYSFFVNGCQVSTSKKQSLLRFLRDEMHLTSVKDGCSQGACGACTVLIDGETCKACVLQTDRLEGRSIITVDGLSKWESEVYTYAYGEAGAVQCGFCIPGMIMCTKGLLDRNPDPTEEEIKYALRNNYCRCTGYVKIIAAVKLAAKIMRAGKIPAAGADDWLLGSRVHRLDVEEKVLGYGKYPDDYYLDGMCYGTALRSKYPRARVLSIDTTAAKALPGVIDVFTAADIPGENKIGHLKHDQYTMIPVGGLTHYLGDAIALVAAEDMETAEKAKKLIKVEYEVLPAVHNIQEAAAEGAPLVFDEETTNVQAYKHVSRGNADEAISKAAHVISHHFETPWTEHAFLEPECAVAYIDDDGDVMIISTDQSAYCTFHESSLMLGTDKVKCQNALVGGGFGGKEDMTVQHLAALITYLTRRPVKVRLTRAESLLVHPKRHHFEMDFTMGCDEEGHIMGVKAKVASDTGAFASLGGPVLERACTHAAGPYAYENFEIEGRAYYTNNPPAGAFRGFGVTQTCFATETLLNMMADEIGITPWEIRYRNAIRPGGVLPNGQIVDESTGLVETLEAVKEEYEAALAAGKPVGIACAMKNAGVGVGIPDWGRVKLIVEEDAKLHIYSGASCIGQGLGTVLVQMTVTNTDLTRDDIVYERSNTWIAPDSGTTSGSRQTMITGEACRRACEKLMEAKGSDKSLKDLIGQEFYGDYLAKTDPLGADVPNPVSHVAYGYATQVCILNEKTGKIDRMIAAHDVGKAVNPLSCEGQIEGGVVMSIGYAVREKYPIDENCKPIEKYGSIGLIRAHEIPKIDAIVIDKPGLNVACGAIGIGEITSIPTAPAITDAYYRYDGSRRYVLPIDNTPYERKEMAVKKKFPYRSALVACNGGCHVQEGQSCENGCIGCGICVSVCPFQAIVINENGVAQVDEAKCVACGKCVRECPKQVIHIHECANYIVVRCSNRQNGKEARQVCLASCIGCGICEKTCTAGAIKVTEHCAVIDESVCLSCGMCVVKCPRHVLTDLRGIICMSNVIVKENETLDSALRRFKRNCAKAGIQQEIRKREHYEKPSVRRKKKSEAARKRKYKMERAFAMLAELLQQEQFELLISEEDQTDHSVETDIRLVYLMNDAVESFLVFKEAKMTGKYLRDYEGMLDATLSKEEETYILTVWQDDQALTIFFKQLELEVYLYEYGEVAHFWVPGYEYLRLLEYQIAILRDKYDYLGENYCTDIEKKLAQLADFPPLNDTCYPAVPEKYLVPRVNGWRPTKAAIDVMIELAGEVNDRSMIRNLKLYRKCHGRWMTRKIAGMLCQTIHQQLIVLISEKMQEGTRHYSKRIFDEKIEDEFNRRLKKAVKRQQKLIASGIRALVYREEPFTTAKDSLEFHVYLMIDEKCRKNRKVRIEEVRMTEQEAYQEHIRYTHDTYCRIVIRHASFDAARMLAARWTCPNNRPTYPTQCASAGMRGLIYKDISIFFKSIDKKLILIAAAAIVLLIFNAGIYAGLFTSVMFAMTIGMQNIMSFASDEKASWKKYQLAMPISNFTVVASKYVSVIYTVAISILGSIAFNSLSSIIFQNFDMLIWLFSIAAAIIIPLLWTGICLPLTYWFGFRSAQTMGLIVVIPMFYFVKYFEDGPGMAAMVNSVHSYVLITGIAAILIFGISLIISTIGYSRKNMDNNILVQNLCKQFEDFSLDNVSFKVPKGRIVGFIGENGAGKSTTINLILNELSKDSGQIQVFGIDHTIPTVKENIGVVFDECNFHDVFTAADIEKILKGVYKTWDSNLFSQYLKKFKIPTKKTIGTFSKGMKMKLSIICAMAHRPKLLILDEATTGLDPVVRDEVLDLFWEFIQDEDCSIFFSSHITSDIQKIADYVILIHQGKIIFEEQKDDLVYNYGVAKCGKEKFAQLSSDDYIIHRTTNMSVECLVHDKEAFKRKYKNIIVDNATLEDIMLFYVKGGTSCEDMEIIISNSSDKPIYEQICMQVKSFIMDGTLSAGEALPSMRALAKDLHISVITVQRAYEDLTRDGFIETVSGKGSFVASQNREFIQEEQLRIAEELLQKVAEIGRAHGISLEQMTNILKLFYEEMAVYQIHVCYFTAHEHLYMDYKNDISFMIDSTLNSYEHQSTWNPNMPLRGLGYFARLYEDYVRLNELNIYSETRLKLPKPQYFVFYNGTKAEPDRQILKLSDSFPDDGIQSHLEVMVVALNINYGHNRELMEKCRKILEEYMHAAVKHTIVIQIQSFFWQVFLLSAILLGIPLFPYKKPNSGMVKQHKRFVQNQVQTHFSQKEKKKYPLWKIAMATFFQVPDETLANLPVFYGVGRHRLRVENYSSIQIYQEEKIVLHCPKMSVTIVGKALQIICLNEDEVMIEGYIEHIEYRMSVVSNQVRCLVTGEETLRFVNLCRNNGIELRHLVRRENAIQMEIDAENFKKLRPLVRKTHVKIHILNRHGPAFFFYRHKRRWWFLLGMTVFAGMIYILSLFVWQIDIDGNRKYTDALILQALAQMDVKTGCRKSEIDLPEIEEELRIMYNEITWVSASITGTKLQIELREGDLKISGSSGGGQTGNVKRVENRENNPKTQNGESETDLPANLVADEDAIITNLVVRRGTVAVRYGDEVKKGDVLIEGKVYIYNEDETLKKVDYLTAEGDVFGKYQELYEKHYQRKHEVRSYTGKNYRELGVEIVGKSFCLPVWENILKKQLEENTLSEVWSWKKQFRLTPTFYLPFALEYTEYVPYENVVEEYTDEVIKKMAEEELQKYLNELEKKGVQIISNSVTISLDADGGHVKGTLILDGPIGKEVPISSEHMASTRHNEMSITEEIIDIPAEHIRNVFGEFDHYIKNIERALNVTIIARGGSLKIIGEAAKTKRAVNVLNQLIQLSVNGEVITDQNVNYTLALSMEDKQEKVTELYDELICHTIGGRPIKPKTHGQKNYIRNIREKMIVFGVGPAGTGKTYLAMAMAITAFRNNEVNRIILTRPAIEAGEKLGFLPGDLQSKIDPYLRPLYDALYEIMGAESFQKNMEKGLIEVAPLAYMRGRTLDNSFIVLDEAQNTTPAQMKMFLTRIGFGSKVIVTGDLSQKDLPTGQQSGLDVALKVLGGINDIGICMLSSQDVVRHPLVQKIVKAYDDYEAKQKHLSKDGLKKDEAARARTKRSSVRRKISERGDKMTVNIDYEADKKLDFDYEKIIREVINGALDFEECPYETEVNVVLTTNDEIAMINRDYRDLFKPTDVLSFPMIDYVRPGDFSVLEEGLTEDFFNPESGELILGDIILSVDKIIEQAASYGHSQQRELGFLVAHSMLHLFGYDHMQDEEREVMEEKQRDILNMLNLKRMKKKKYGMTVVCMTIGIMMIAVSCGGKKQESTDTEVQTAVVVETQAMNATEAVKETESALPAGEMYSYLTGEPVSETIGKQRPYAIMINNIDVSLPQSGVSQAEMIYEAQVESGITRLMAVFQDVDNIEKIGSIRSARHYYIDFANDNDAIYVHYGQSKYALSRIEDDNIMTIHGLSGYESKVFYRSSDRKAPHNVYTTGKMLAEGLEVTGLTRDYPEGYTPRLQFNHVDTELKDGINAQKVNIPFDSEPYFTYNTEDGLYYRYQYGEAHIDRENDQQLTFKNIIVQYVNEKSISNQDHQDMTLNGSGKGLYITDGKAEEITWKRNDNADKTKYYDASGNEISLNPGKTFFEVVSDSKTVTLEMGSSSKSKNKGGDIIVQGSILAAAQIIVRLIGLFYRIPLQRIAGDVAMGYYGYAYDIYMLLLLVSSNGVPLAVSKLVSKTHAKRDYTNEHRIMVSALLWTLVVGSVIGLGTFIFAKQITSAVFGPEMIGVVPALRVLAPTIFLCCVMSTFRGYFQGIGSMMPTAISQIFEQIFNAVVSVAAAAILVSQGPAWAAMGGTLGTCIGALASTIFLIIIYMLYRPRLMHRVHKDKLHQPESYKNIYKVLTLTMAPVVLSSVIYQVSGIIDSSLYSNILAKLGYDAELISSLYGVYSSKYKMLVNVPMAMATALGLAVVPGISSAMLRGDREEIHSKIETTVKFCMIIAIPACVGLSVLGGPIMQLLFNDSSALTRHLITIGTPYLLFYSLSTVTIGALQGIDKMNTPIVNSGIALAIHTVFIVILLRFCDMNIYAILYSNILFGFLMCIFNQVALRRYIGYEQEAKQTFLIPAAASAVMGVATFIVYKGVYFVLHINAIATLLAIIVAVVVYAVALLKFHGLTEEELYSFPKGTTLSVYLKRFHLIMIYDVCIIGGGASGLAAAIAAGREGASVLVIERMDKTGKKILATGNGKCNLTNQAIRRGCISSGVYRSGQEVFPLHVLENFDAGDTLAFFESMGLYTKARDGYVYPMSEQAASVRDILCWELAEQKADVVTGQEVKKIRVGGKGLSKGGFTVYSVDNVYQCRKLIMACGGASASKLGSNGSGYRLAECLGHHVSAPVPALCALHCKEKYFKELAGIRLQGRVRLLTGGKMAAEDSGEIQLTAYGISGIPVFQVSRYAAKALQMKKTVTAVLDLMPAVSDKGLRARLMWQMHASPKWTMRMVLSGMMNSKLAACLLKCAGIDGGQPCCKVDDRALERLIALVKHHEVHINATNDFEQSQATAGGVDTREIEEKNMASKIVRGLYFTGELLDVDGICGGYNLQWAWATGILAGSDAGRSCRVKGMLKVNQIKLPLNHSKNQLKEAIVHKLRIRPEEMIDYRILKQSIDARKSGKSGHAGEVLYQYSVAVTLANEKQYLKKHHANKDILPYTPVIYQMPEKAADKPAKPPVIIGSGPAGLFCGLMLARQGYDPIILERGSEVHTRMEKVNAFWAGGKLDKECNVQFGEGGAGTFSDGKLNTLVKDPFGRQRKVMETFVEAGAPEDILYVQKPHVGTDLLVGIVERLRNEILSLGGQVHFDSKVTDFVIDAQNHIRGVIVNDREKIEADQVVLAVGHSARDTFEKLLERKITMEPKPFAVGVRVEHPQSMINASQYGSVADQLPAASYKLTYRTGKGRQVYTFCMCPGGYVVNASSEEGMCAVNGMSNRGRDGANANSAVIVGVSPEDFGSSDILAGMAFQRKWEKLAYEEGQGLVPVQLFDDFKEKKVSERFGAVKPEHKGGYHFGNLWHCLPTFVCESLVEGIDAFGRKIKGYDRPDAILSGVETRTSSPVRIPRDEHFESSVGGLYPCGEGAGYAGGITSAAMDGLRVAEAVAAAYAAVKQAKMLITNKHYRQNLKNKKRIVIKVGSSSLVHPETGETDLLKLEQLVRVLCDLRNQGKDVVLVSSGAIGVGRKALGLNERPKELAQKQACASVGQGMLMMIYQKLFNEYSHVASQILMTKHTIVREKSLHNARNTFNELLRMGVIPIVNENDTVSTDEIEIGDNDTLSAVVAAITGADLLILLSDIDGLYTDDPSQNKDALFIECVTDIDDSLYEIAKGAGSDYGTGGMKTKIDAARIANDAGCDMIIANGKDFHVIDDIMKGQEKGTLFLAHKSEKFNILDYIEPEKIINGGEEEIHDYRCMITDADIKRINELYHKSKSEGLTPDEKQEQVKLRESYIESVRANMRRQLNNIDVKRPDGSIVSLKEQAAQNLAKKKKHANMPTDICEAKRMLRKEILSKRRHLGEEICQTFGRQFAERIVGLDEYKAADTILCYASCKGEADTWKLIEKALEDGKRVALPRVTGPAEMHFYKITSMKDVAPGYYDIPEPLENCQEEVFEGFLVVPGTAFDRQMHRMGYGGGFYDVWLKRHGSHVTACGLAYDFQLRNEIPFERHDRMMNIVITPDEVIRKGDAADDNDMTTIEELGRRAKQASRHMNRMGTTQKNQILALAAQALVDEQEEILNANAMDIEAARKKNMPEPMVDRLVLSESRIAGMAEGLTQLIALEDPIGEIISSTVRPNGLEICKKRVPIGVIGIIYESRPNVTADAFGLCFKTNNTVILKGGSDAIHSNMAITKVLRKAIAAGGGCEDALLLVEDTSRETAKAMMRLNQYIDVLIPRGGAGLIRTVVENSTVPVIETGTGNCHVYVDASADIDMAVKIILNAKTQRTGVCNACESLVIHKDIIGEALPAIAKALREKHCELRGDEAALEVVPDMKKATEEDWGTEYLDLIASVRTVASVDEAIEHINRYNTGHSEAIVTKDYANARKFLDEVDAAVVYVNASTRFTDGFEFGFGAEIGISTQKLHARGPMGLKELTTTKYVIYGDGQIREMSINDYTKTEGVSQLPSDETEKQLFIIEQLHEQMQADYARTGKKKTYHVVTFGCQMNARDSEKLAGILERIGYTETDTEDADFVIYNTCTVRENANLRVYGRLGQMKRTKQRHPDMLIALCGCMMQEPLVVDKIRKSYRHVDIIFGTHNIFKLAELIQTRLNTGKMVVDIWKDTNQIVEDLPNERKYSFKTGVNIMFGCNNFCSYCIVPYVRGRERSREPKDIIREIERDVADGVKEVMLLGQNVNSYGKNLENPISFAKLLQEIEKIEGLERIRFMTSHPKDLSDELIAVMGQSKKICRHLHLPLQSGSSRILKLMNRKYTKESYLDLVDRIRKGCPDISLTTDIIVGFPGETEEDFLETMDVVEKVGFDSAFTFIYSKRTGTPAASMENQVPEDVVKDRFDRLLKLVQQKASEASARFTGSVQKVLVEDVNEHDETMVTGRMSNNLLVHFKGTPDLIGQIVDVHLEECKGFYYIGNLSEMSVKINVSEIFASNVFDDATMKQRLPKKIYAEFKNTLLEGKDLEPHVAEIIAHEMKEWAIEKGATHYTHWFQPLTNITAEKHDAFINPQKDGSILLSFSGKELIKGEPDGSSFPSGGIRATCEARGYTAWDCTSPAFIHEAPDSTPVLYIPTIFCSYTGEALDKKTPLLRSMEALSTQAMRIIKLFGDTTATKVVTSVGPEQEYFLVDKDTYDKRKDLIFTGRTLFGAPAPKGQELDDHYFGTIKERVLAYMTELNEELWKLGITAKTQHNEVAPAQHELAPIYDTTNIATDHNQLIMEIMKKVALRHNLVCLLHEKPFAGINGSGKHNNWSMSTDTGKNLLEPGDTPHSNKQFLLVLASILKAVDDYAPLLRMSAAIPGNDHRLGANEAPPAIISVFLGDQLEDVLSQLCEKGEATRSLEGSQLETGVSTVPRFSKDATDRNRTSPFAFTGNKFEFRMVGSSASIADPNIVLNTIVAETLCQAADILEKADDFELALHDLIKDWVTDHIRIIFNGDGYSDAWVEEAARRGLPNIKNTVDATSVLADPEVIKLFEKHGVFSAVELAAREEVGYENYSKAINIEARTMIDMVKKEIIPAVMEYTTTVAKSVAAVKAVGADASVQEKVLKEITTELSKLDASVVKLEAATDASVKIEDPKAQAIAYRDDVFAQFAEVREPADKLETLVDEKAWPFPTYAELLFNVMNNEKIFLYMISAAALCFCLFNILQFLLNYNKTAQTVGTIISIKTPGPETSKFRNSKWAVVSYKVKGRIYQSHNRIQVPMSSQIGSTVTVRYDKFTPEKLYSYSMLRIVVSFIIAAVFFVIARFGLMLSVIFCVLILLQYISLKEYQFPKAASLLCAATFSRKMMVLSLYIFCIAVYVVCCTIYTIEALIIPGLDTMNAAMFFLMFLVTSVLISIYLPIQYKLGYEKTKFAFTVVIIASPFLLPQLMKMENFNLNFLSEFSPILICGSVLLLSCMILAVSAALSIKFYNRTDLAMMLWYLLKKDILIIKKYVLIMLAAAVLIPPFMLMKDILRVKNLNKSYKNFSLTDVSFSLSEGCITGFIGINGAGKTTTLRTILNLAKKDSGNIQFFGLDMDRNEQQIKNRIGVVLDDGCFYEELSMAEMKSILASAYTDWSEQDFKHYMDMFSLDPKRKINTLSKGMKMKYALTLALSHNAELLIMDEPTSGLDPLSRSQLLNVLNDYMENGGKGVLFSTHITSDLDKIADMLIMIHNGRIVFQEEKDFLLDNYRIIKGDKKLLTENIRQLFLNITETAFGFTGVTRHAARVQPYLPDALTERPTIEDIMLANLGGCGKMKILISNTSDSPLYQQIKDQIKDAILKEELVEGDALPSIRAFANDLKVSVLTIRRVYEELEHEGFITSQVGIGTFVSAGNLELLRDSKRRLVEQKMLDMIQTAKSLKITKGELNAMMDILYEEDMRNVLNVFIVCEADWMPRQGMQGSLEKFTDRERKELKVWEMGIKYTSLTKKAMMICFETHKNQKDKSGMPYVFHPFHLAEQMETEDEICTALLHDVAEDSDCTIEDLKKEGFSADTIEALRLLTHEKSVPYMDYIAALKGNPIARKVKLADLVHNSDIGRLAIVTDKDLKRTEKYQKARNLLLEEMAALTPMMQQYMAIKEQYKDCILFYRLGDFYEMFYDDALTASRELEITLTGKNCGQEERAPMCGVPYHAVDVYLNKLVAKGYKVAICEQAEDPKQAKGIVKREVIRIVTPGTNLSQQALDEGRNNYLMCLVYDNNQFGLAITDISTGDFYTTEVATLKELYDEIHRFSPSEIICNDSFYMSGASLDDFKDRLHVSVSTLDTWYMDEAVSVQKIKEHFRVASLDGLGLTDFPSGTLAVGALLLYLYETQKNTLDNLTKITPYRSGGYMIIDSATNRNLELIETLREKQKKGSLLWVLDKTKTAMGARLMRNWIEQPLIEKKKITARQDAVEELYNDMITREEIREYLNAVYDLERLVTRISYRTANPRDLIAFKTSLGMIPPVKQLLSQAKSAELKEIDERMDCLEDIYDLIEKSIQDEPPIMIREGGMIKEGYNEDVDKFRLSRTEGKTWLAELEAREKEKTGIKNLRVRYNKVFGYYLEVTNSYKELVPEDWTRKQTLANAERYITPELKELEDMILGAEDKLAALEYDLYCEVRDSIGEQVVRIQETAKAIAHLDVLASLACVAQSNDYVRPSINTKGVIDIQGGRHPVVEKMNNNQMFIDNDTYLDNKNHRISIITGPNMAGKSTYMRQSALIVLMAQIGSFVPAKSANIGIVDRIFTRVGASDDLASGQSTFMVEMTEVANILRNATSRSLLILDEIGRGTSTFDGLSIAWAVVEHISNPKLLGAKTLFATHYHELTELEGKLDSVNNYCIAVREQGDDIIFLRKIIRGGADKSYGIQVARLAGVPDSVIDRAKEISSWLEETDVTDKAKNLQVRTSAKKKEVVREAVPAEKQMSLFDIYPADHPVLKELAGLDVSNMTPIQALNTLYELQKRLKETNMKSIHLLDSDTINKIAAGEVVERPSSVIKELVENAIDAKASAITIEIKEGGIAMMRVTDNGGGIDRDDIKTAFVRHATSKIETAMDLMTVGSLGFRGEALSSIASVSQIELITKVHRELLGVRYCIDGGEEKSCDDIGCPDGTTIIVRNLFYNTPARRKFLKTAATEAAYINDLAGRLALSHPDVSFKFINNNQNRLHTSGNGNLRDIIYQIYGRDVAGQLLEVDVQGKLCHVTGFIGKPILSRGNRSWENYFINGRYIKSNIITKAIEDAYKTFVMIHKYPFTAFHIEVDPALIDVNVHPRKMELRFNQNEAVYQEIYDIIRAVLEHRELIPAISLEDQKKANGKEKEKESGPEPFELQRLAAMGAGQKKPEQSSSAYSKSGHSVPTGFSAKSSVAAGSGYSAASYPNQGADSKPYTAPTGQSGSAFVRETPTAYHHKETMTQSTSKLQDENNRAVMSETTEEQKKTEVTLSEAAEKAPKPHMPIVGEQMQLFGEDERLLDEKARARHRLIGQVFDTYWMVEYDGKLFIIDQHAAHEKVLYEKLMKAFSQKALQKQMLSPPVILTLSMQEENIYKQYADYFAELGFEIELFGGREYAVRGVPLQLFGMNARDIFIEVLDSVTEESRRLDGSAITDHIATMACKAAVKGNNKLSFKEADTLIEQLLQAKNPYTCPHGRPTIISLSKYELEKKFKRIQSMKQPLIVLTGPTASGKTALSIGLAKAIGGEIISADSMQVYRQMDIGTAKIRPEEMEGIPHYLVDVLEPDASFNVVIFQQMAREAMARIRANGHVPIIVGGTGFYIQAILNDIDFKENEDDGYRTQLEEMAAKEDGPKKLYEMLKKVDPESAEKIHGHNTKRVIRALEYFHQTGQKISEHNEQEAQKESPYNFAYFVLNRPREILYDRIDKRVDQMMEEGLVEEVRSLKEHGYDRSLVSMQGLGYKEILAYLDGEITLEEAVYILKRDTRHFAKRQLTWFKREREVLWIDQSQYDGKEAILTDMIHILRQKGIIDGSCIIMTNDKIEYELKGLYEHLHLDEDVYDYCSKIEKSLKERFEAIDQVAEYNQLKVIHAMQKNRVSERHFAGTTGYGYDDDGRDTLEKVYADIFHTEDALVRPHITCGTHALTVALSGNLRPGDELLSPVGKPYDTLEGVIGIRPEVGSLAEYGVAYRQVELLEDGSFDYPAIEKAINEKTKLVTIQRSKGYLPRPTFSVQQIGELISFVKKIKPDVICMVDNCYGEFVETIEPSDVGADMCVGSLIKNPGGGLAPSGGYIVGRKDCVERAAYRLTAPGLGKELGANLGVNRALYQGLFLAPQVTASALKSAIFAANIYESLGFKVVPNSTESRHDIIQAVVPGTAEGVIAFCKGIQAAAPVDSYVTPEPWAMPGYDCDVIMAAGAFISGSSIELSADGPIKPPYAVYFQGGLTWHHGKFGIMMSLQKMKEAGLVHLPLMQKIKKHLTMKELPVTERPYEKCEKNGAGTLSDAELLAIILKTGTRGDKVMDLAVQLLNLNPSCPGLEGIMGLELADFQKIRGIGRVKAVQLAAVCELSRRMTRIQFSESYAFTTPQSIADYYMAYMCRLGHEEVHVMMLDTKQHMISECLLTKGTVNASLIAPREIFIQALKAGAVSIVLVHNHPSGDDTPSREDLAATEKVRSAGELIGIRLIDHIIIGSGHFTSLCGSWNHMAGRKYGLDLGTMNIRIFQGGHGLVVYEKNMIAIQRKKEVAAIGNDAFEMYERTPASIVISNPVRDGVIADVNNMNKVTEALLKKCGCTTGFMRNNSFYLAVPSDVTEVEKRAYFDLIAHSAYNTHNIFVVEKPLAAALGENVDVKSKKGMMIVDMGAGTTEITVITMGGIVVSKLLKVGGNTINASICQLVKERHHLVIGDKTAEYLKLELGHAIPGQGRGKTVFGRDVITGLPSKAEVSDHLVFDSMKNYLFQVVRTIRNIMETIPPELSGDIIENGIYFTGGTTLIPELDRLFNASLRVKVVFAPKPLESTARGLGVIMDHASDYKDLTFSLRDAAFEMKNNKKNKINPKYVLAALSLLCIAGIGLSLFRGFSMPAAGTIVNSLMAPMQEGINSFGNFTAGIVQRKHKTTQLQNENEELNNEVDKLQAKLTAMENNLSDYEDLLDLLALSEKYPSYDMTGARIIGKDAGNWYDTFTINKGSVDGIKKDMNVVAGNGLVGIVTQVNANSAVVRSIIDDASNVSGMISKNRDICIVNGDLTLMDSGLLDVELITKGSTVVKGDEVVTSYISDKYLPGLLIGYISDVTENDTELTLSAKLTPTVDFQHLSNVLVIKQLKEDMKETGSASETVASDTQSTSETQSDTADSTDSSEEGEMKKILAYGGLILLFLLLQCSFFVHLSLADVVPNLLIILTASIAIINGSLEGCLVGFCCGLLLDLMFGPYIGMYAFGYMLCGYLTGIGNRLFYKEDLTFPVLMIAAADLFYGFYMYVFGFMIRGRLNVLFYLRRIILPEAVYTVIIAVFLYRIILLITEHLEKKGSENLIVMRISLFKNLLEDILSFIKTRTFILGVVYTILLAVLIHRLFQLQIINGEDYLNTFTYRIQKDTEIESPRGTIYDCNGVPLAYNKLSNAITIEDSTLLTDNQTRNTMIAKLIGFIESTGNTLNYDIPLEMDASGTLSFNAGENTVLRFKKDVYSSEKLTDEQTNATAEDVYAYMRGKKLFNLDESYSKEEALKILSVRFDLWMKRYEKYLSITVANDVNDQLVAAVKENAEDLPGVSVEQSYTRVYADSKYFSNITGYIGSISEDELAQYKEEGNDSYSLNDQIGKTGVESYFESKLKGTKGSQKLYVNSLGSVLEVAKKEDPIPGEDVYLSIDADLQKKAYDMLEERIAGILLTYMSDTTTNTGSDIMIPIKEYYYALIDNNVISLSHLSADDADDREKSFWKDYKNYESSITSSLDSKMDTALGELDDEYKDYLLMTYSMLKDKSILNTGDLDDNDETLAKWNDGSISFNELLDYAITKDIVNISALNLESDYLDTNEIYQALIEYVAQELPLYEGFEKKAIYYMLESDYISGTDICLLLYSQHVLEEDDDYQGLLSGSLSAKNFMYNKIYNLEITPDMLALPPCSGSFVLTDINTGKVKALVSYPGYDANQINNVSYYASLINNSSSPLYNRATQQTLAPGSTFKPISAIAGLEEGVIDADTYITDYVEYTKVVPHANCWNSAGHGTINVEQAIEYSCNYFFYEVGYRLGSKNNTTELNDSTGLALLAKYAKMFGLDSVSGLELPETTPRISDESVVRSAIGQATHNYTAAELARYVTAIANSGNLYQLSILDKITDSEGNVLEENEPKLTNKIELKQSTWDMVHTGMYKVCNESSYRSQMGGLKVTLAGKSGTAQVSEKLPNHGLFIGYAPYENPEVAATLIIPNGHGSSNVLDLYADLMCYYFGVPEKNASDDISGSATRTANIPDQNIQADMGEVFVITSGKGGVGKTTSTANIGAGLAAADKKTILIDTDIGLRNLDVIMGLENRIVYHLVDIIEGGCRIKQALIRDKRYPNLFLLPSAQTRDKTSVSPEQMKKLIEQLRDDFDYILIDCPAGIERGFYNAIAGADRALIVTTPEVSAIRDADRITGLLEASHIKNINLIINRIRFDMVRRGDMMSIEDIVDILSLDLIGVIPDDENVVVAANQGESLTGYHTPAGKAYENICRRIMGEDVSLACYPRRKSFFFRVADYLIHRMFSFLFGRKRKISGKVASSRLKQLLLSDRIACPTEITDSIRGDIVSALSKYVEIDIQNIDIHITQKENQNRSRSPLLTVYVPFKEINRHSVMLQRRKILQYHTNKYNIHMYNFRLVLYVWVLSIIGILVINSAADGFAAKQLIGFVGGSVVMIIFSLIDYNYIAKFEWFLYSINIGMLIAVKFFGISVNGARRWFSLGPFGTFQPSELSKVIMLIIFAHLISEQKEKINSLATILRIGILYMIPMFLVAWEPDLSTTMVFAFLFCTLMFVGGISYKIIGAILGAALPLGGILIWYIQQPGQILLHDYQLNRVLSFLNPSDYLLTTYNQQYNSIMAIGSGMLTGKGLDNNTITSVKGGNFISEPQTDFIFAVVGEELGFIGSCVVIGLILLIVIECLRVAKDARDMRGHLVASGVAGIITFQAFVNIGVATGMLPNTGLPLPFVSYGLSSLLSNFICIGLVLNVGLQRNRRMNIGLVAHDTKKMLMQNFCIAYRGILARNELYATGTTGRLIEEVTNLNIHKFLAGHLGGEQQLGAQIEHNNIDLMIFLRDPYTPKRHEPDAHAIVSLCDAHNIPIATNLATAELLIKALDRGDLEWREFYKMKKILAAACICSVLLCGCQSQTAYLKPYTVVTASKTADAASMLNIEAWEGFAENLGVVSVEDSENGINQETLSQLDAKEIFLTGTTDKTVITAKNIYTQMPPASITKILTALVALENVQDLDQEVTLTDDVNVDVADAQVCGFKAGDKMTLKTLLYCMLIYSGNDAANAVASAVSGGDIPAFCDKMNAEAQRLGATQTHFVTPNGLDDPDHYTTAYDLYLIFNECLKYDLFKDAIHQAHYTSVFTRNGQEVQQTYDSTNYYLLGNKTPPEGVSIIGGKTGTTDNAGLCLILYVEDGSGNGYISVLLGCPDKDTLYSSMSKLLSDISKMIQIISGVKGKGKTKFLIQKANEAVKAANGSVVYLDKNNKHMYELSNRIRLINVGDFPIDTYDAFIGFICGLISQDRDLEHMFFDSFLTIASVSDDYVGYVLSKLADVSEKFNVDFTISISIDADNIPEEFKKDIVISLMERNWLDITALILIIIGAINWGLIGFFEFDLISYFFGTLTAVTRIIFAVVGIAGIYSLILFWKLRTNMKEEKTVFYPYSSWLKQRYGEKVYKLPVNLPVSCPNRCDGHGGCTFCSEKGTGFESVLQPASVTEQMQHARDVVAKRYKARKFIAYFQNYTNTFMAMELFKAYLEEAAAFPDVVEISVSTRPDCIRTDYLACLAELQERTHVGINIELGLQTANYHTLDRVHRGHGLAEYIDAVLAIKRYPFTVCTHLIANLPGDTLRDAVETARIVSVLHSDIVKIHSLYIAKDSQMAEDYLAGRLTICSKEEYFERVRVMLENLDPSIAVERLFSRIPEQDAVFCNWGISWWKLKDEFEVYMQQNSSCQGKHFDYMNGSALKGVFMGSEKQTVSKNGGRHLKLNIGLIVFIGIFIYLIAIGLSYLMRNHISFYEVQQGWIVDSDTFTGFILRNESVVNTGQSGYINYFVNDGAMVAREGNVCMVTTNAGSSVQGTADGSALTLNGSDYSDIREQVLSFKKKYNDSDYASVYDLDYQLGNIVSNIVSRNNINSMNQADSASGYTVMTADQSGIVSYSYDGMESYTQDDMTPELFSARNYEKTQLSAGMKIDSASPAYKLIYDDNWQIVICPTADQYKRLKELDTVNLQLQRDNITVSADVSTFQKDGTDYVSFSLSNYMVRYCNDRYIDIEIIWDNHDGLKIPKSSIVSKNFYRIPADYLQTEEESSESGFYSVDNDETVFIKPVIYAQNKEYCYVDCADIAEGTVLKKPSSDETYTIGETEALKGVYNINKGYAMFRLIDILYEYGDYCIVSDKTDYGVTLYDHIILNGSSVKENDIIYMLTENVIEVEKHVQAACDRAGRSRDEVTLIAVSKTKPVSDIEEVLTTGILDYGENKVQELSDKYEVLPKNIRWHMIGHLQRNKVKYLIGKVVLIHSVDSLRLAEQIEHEAAKADIVMPVLIEVNVAEEESKFGTTSEAAMQLVEAVSKMPHIKIRGLMTIAPFTDNPEDNRIYFRKLKQLSVDIKSKNIDNVDMDELSMGMTGDYEVAIEEGATMVRVGTGIFGKRNYQIMSKGFNKILDFMKLNDDEYEEYDDEEIDTEEEPEEAPKKKTFARSTANSRKTSARQKDELEDMADDWDDEPEVKSTRSTQAHTSSRSTRKATPYGRSSKIVPMHSNITSRSMEVCVSKPDEFDTCQEICDIILSGRAAIINFDAVTTQEAQRIIDFVSGSCYAINGNIKPISDTIVIVTPEDIDITGDLQELASSSVNVPAFGYSEEEEMLTPIEIQGKTFKNSGMGYSKADVDSFFSSVSADFEALYKENLSLKEKINNLDASLSHYKEIEKSLQKALVLAETTAEETIVGAKKNATVIEQEAVLKAQSIVADAKVELEQLHVKTTDLLQQYDRYRTQYKALASAQLDLLNSEAFDIDVATMKAISGLEESAAEHTDQLQAEPVYAVEETESEETAVEQEEDFDETLSTDDAMIKDFSEMFDSEKDEENQMQKMMIHYNDVPIYPIVLSENFDALGEELDDLMIKDRKVCIVTDSHVADFYLEQVEHIVKEHCAAASHFIFPAGEESKTLTTVENLYEFLIQNKFERKDMLVALGGGVVGDLTGFTAATYLRGIRFIQIPTSLLAQVDSSIGGKTGVDFRAYKNMVGAFHQPKLVYSCAETLKTLTSQQYISGLGEIIKHGLIKDAAYYEWLKVHKEAILARDTQTVIDMIAVSCHIKQEVVENDPEEAGERALLNFGHTLGHAVEKLMNFTMLHGECVAVGMHAAAWLSMEKGMLTEAAYKDITDTIASFGLPVSVKGLEPEQIVAVSKSDKKMDKGRVKFILLDPEGHAVIDRSIRDEQLLAAASVIVRNGEQSMKYIKAGIAVLLLVLLDQWTKVLAVRHLMNTDGITLIPKVFRLYYLENRGSAFGLMQNQKVFLVFFTVIILAALTFFYRKIPDTGRMMPLKIAAVLIYAGAIGNFIDRIRQSYVVDFFYFELIDFPVFNVADIYVTTAAIALIILVIFYYKDEDFEFLGGKKAKKTKAMEQRSYVVDEANDGVRIDKYLALLMEECSRSYIQKIIGDQSVCVNGKAVKANFKIHTGDAVMIELPDPVILDIQPENIPLDILYEDQDILIINKPKDMVVHPAPGHYTGTLVNAVMYHCGEDLSTINGVLRPGIVHRIDKDTTGVLVICKNDRAHRAIAEQLSVHSITRAYYAIVYNNIKEDEGTVDAPIGRMDADRKKMGINHKNGRHAVTHYRVLERFGKYTYIECRLETGRTHQIRVHMASIGHPLLGDTVYGPSKDPFKLEGQALHAKLLGFIHPSTGQYVEFESPLPPYFTALLDRLRQSAGRMKKHKKDPLYKSFGYAFQGIYTCISKERNMKIHCCVSLLVVIAGIIFQLSVTEWCICLTLFGLVMALELVNTSIEAVVDLVTEERKPLAKIAKDTAAGAVLIAAIMAAIIGCVIFVPKVMQFLTGLMEKLGESLKKLLLIGIGTAAVTAEKSKEVLDDLVKKGELTVEQGKVLNKELKHNIKETLKDNVNVSVKASTPEELQTLLEKMTPEQIEQLKQQISNMEQTAEEKTETVESEEAPAEATEDAPAAEEAADAEMKEITAVLHKHAITRGVSPEKLRMILEDLGPTYIKLGQIMSLRSDILPKRYCDELMKLCSDVAPMPFDQVVDVIQDAFGCPWQEEFQSIEEKPLGSASIAQVHRAVLKSGEQVVIKVQRKGIYRTMARDIGLMHKVVRLLPPVSIKEMVDLDLVLDELWKVTQEEMNFLTEAANIEEFHRKNRDVAFVDTPVLYREYTTPHVIVMEYIDGFSIDDKENLQENGYDLNEVGSKLIDNFIKQVMVDGFFHADPHPGNLRVRDGKIVWIDMGMMGRLSEHDREEIGRAIEGIALNDIGMIQDAVLAIGEFRGKPDQSKLFEDIRNLMAKYGSEDLGNIDIAEIMQDLMEVMKENKITMPHGLTMLARGLAHIEGVLADISPEINMMEIASARVKSQMFEEMDWKKELKNSGKTLYRSLRKAIDIPTLLADILQGQMKGQTKVNLDLHAGEDVSNLLRRVTRNIVMGLWVMALLISSSIICTTDMKPKFLGIPALGAFGYFIAVIIVFYVFAKHIFSKRKMSKGSIRQKGSKWYYRFYIEDENGQHISILILFFMINRSLSRIINIITYFFFDSFIKLKPDKIPLSSANGKRKKMSFVLTKKLPTPMEIKELYPVSEELAALKAEKDQELIDIITGASDKFMVIIGPCSADNEEAVCDYIGRLTKVQEKVKDKLVLVPRIYTNKPRTTGEGYKGMLHQPDPEKAPDLLNGLIAIRKIHMHALQTFHMPIADEMLYPENFRYLSDILSYVAVGARSVENQQHRLVASGIEVPTGMKNPTSGDLSVMLNSVVAAQHGHNFLYRGWDATTDGNPYAHTILRGAVDKHGQTHPNYHYEDLQLLNEMYAEKGLKNPACIIDANHSNSGKKHKEQIRIVKEVLSSRQHSDDIRKLVKGVMIESYIVEGNQKVGGENHVYGKSITDPCLGWEDSERLLYDIAERVMKNKIIAAILLMGILWNGQMVYAEDTAVGEVIATESENSESTNAETTEMELERKSESQGVVSTESAVTVISEAAVLMEAGTGTVIYEKNQDVRVSPASITKIMTLLLIYDALYNGKIQLTDEVVTSARAKSMGGSQVFLEEGEKQTVETLIKCIVIASGNDASVAMAEYVSGSEEAFVEEMNQKAADLGMNGTHFVDCCGLTDSNDHYTTAKDVAIMARALITNYPDISQYATIWMENITHVTAKGSSEFGLSNTNKLLKMANNFEVTGLKTGSTAKAGYCFCGTAVKDGLSLIAVVMDAPDYKIRFSEAQQLLNYGFANCSAYRDDHPPVLLPMAIKDGKTESVELMYDGQFSYVALRGENLENIHSKLQLDESLSPPFEAGTKAGRLIYYLDDMEIGEVPIVTKERIQKAGFSDYLEKVYRNFMSICGMEQRVLLMVNPMAGRQKIRNELLYVVDTLTKAGYETIIYTTQGKDATRDLLAEKDSQFDRVICCGGDGTFNEILSATMHWNKRPILGYIPAGTTNDFAAGLKLPSDIREAAMNIVRGTPHTVDAGLFNTSYFSYVASFGAFTETSYSTPQNFKNALGHLAYILEGIKEIPAFTSYTVCVEADGQIYKDSYIFGAVSNARSVGGILKISDSLVDLNDGVFEVMMIKMPKTLMDLSAIVTSLTSLNPLKYDPSMFLFLQTKELKITFEQEMVWSLDGERVSGGKEARIACIKDAFKILTVMKDKKKWMMAAAAATGALIGRICYECRHFTTEYYDVASDKIPEAFEGFRFVVLSDLHNYDFDQGNRQLLRAIERLKPDAVMIAGDMIDAHPGADMSAAVRMVRDLCDRWPVYFGNGNHEQRIALYPETYGDMHARWCKAIRHPNLHLLRNQHTVIRKDGAYINIYGLELNRTYYKRFRKVPMKKWYLTEQLGICDRKAFNLLLAHNPLYFDEYADWGADLVLSGHVHGGVVILPFLGGVISPQVRLFPKYYAGTYFRGKSEMILSRGLHMHSFRIRLFNMPELSCVTLHHSMEMTFKLEVFEGPLDLLLHLIDINKIDIYDIPIAMITDQYMEYIHRMQIEDMDVTSDFLVMAATLLRIKSKMLLPVEKADAEETGEDPRMELVNRLLEYKTYKYIAQELKDRAFLAAQTLYKPTTIPDDMVYTEPPVDLDALVGDMNLEKLHRIFQSVMKRQFDKIDPIRSKYGRIEQEPVKLSDKMTSIRRIVTDRKKPVSFRGLLTSQSTKEEVIVTFLAILELMKDGSVTIVQEHLFDDILISPGDNMDKSEENQISDENATGVTEMEEVLKPDEAEAAIEALLFTMGEAISAEAIGAVIGHDKATVIRLVHHLMDRYQNEKRGIRIIELDGSFQMCTSPEMYDYVIKLTHQPKKQVLTDVMLETLAIVAYKQPVTKAEIEQIRGVSCSHAINKLLEYGLITEAGRLNAPGRPILLATTEEFLRTFGVQSVEGLPSVSPEEMETLKTEAEEEVQMTLDVMKNSKKKTMRFYLTLAGIKVLIKVLQLCGRNATHVPGRKAINICPDFLDQIDKPEFIIGITGTNGKTTVSNLIADVMQDNGYDIIDNRFGGNIDSGIASSLIKNSTMGGHMKKKYAVLEIDERMTTKIFPYVKPDILVCTNLFRDSYKRNAHSEFIAGILNQTIPSTSKLILNGEDLVSNHLAPDNDRVYFGIACEDEKTTSTNNIIKDVVACPKCGAKLNYEYIRYNHIGRAFCPNCDFGSPEMDYAVEAIDYEKRKVHIRTPKGNMEVKLLGDNITDVYNTVTTVAALEEFGLSAEAISRSFEKMKIAGTRFNCVEVKGKKLVTDVAKGQNPIAVSRVCDFVRHEPGQKAVVLIVDDFYDRQESSENIAWFFDTDFEFLNDPGIEQIIVGGFRCPDMHLRLLMAGIPEEKIVCCDKEPDTAAYVDFDKVDNVYILHDIYTTQYAKAIQKSLSEQLEKEGRMTRIEVLFPEFCSLFADSSNIRYLEKCLPDAEFVFTSYMDEPLFVKEQPDLIYMGAMTESAQEKIIRKLMPYKARIAELIAADVPMLFTNNAVEIFGQYIENEDGSKIEALDLYPIYAKRDMMHRFNCLVRGHFDDIEIVGFKTQFTMAYGETEKYPFIHVDKGTGMNKGTANEGIRDHNFFATYLVGPFLILNPLFTKYLLNDVMKLDAKLAFEPVIMQAYERRVKEFNDPKTEFMNIQKCAIVGCGAVGATAAYTLLGSGLFNELVLIDINQKKAEGEAMDIGHGVPFIHPVEIYAGTYEDLADAYLVIVTAGANQLPGESRINLTEKNVRIFQSIIPEIVRYNTECLLLIVANPVDILTTVALRLSGFPPERVIGSGTVLDSSRFKYRLGEYIGIDHRNVHAFIIGEHGDSEVAVWSSATVSGIAVRDFCDELGIVFTREQMDEIVRDVKNSAYEIIEKKGATFYAVALAIRRIAEALIRDEHSLLTVSGYCSGAYEIEDVCIGLPMILGRDGIENIVEIPLNQLEKDNLHESANALKKILTDMGINMNDWIKQIGQFLLVALGICCTLFILIQNPAAAAETGQQEEKEKLSLNARAAVLMDADSGRILYGKNETMAFPMASTTKIMTLIVALEHNEPDQIVMASAGASAMPEVRLGVHEGERYRMEDLYYAMMLESFNDAAMMIAEGTVGSVENFAELMNEKAISLGCTQTYFITPNGLDAADEKGVHSSTAEDMAKIMRYAIDNEDFLKITQTADYSFTDCDRKRSFEVHNKNVLLTMMDGVLSGKTGYTADAGYCYVCAVKKDDRTFIAALLGSGWPPHKGYKWSDVQTLLDYGDKNYRYQTIDISKGVPDRQVHVMNGEHDFATVRAKQTNYRFLLSSEDKVHVESVLPGQLEAPVEAGQPVGSIQVFVNGDLTAENDYITADRIGIRRTWKERLWRKMDKIEIKKKQGSIVEALRDAILSGSIPADTEMTQNELAQSLGVSRMPVREALIILEYQGLIRRLPNNHVRVVPQTREYIAELFRMCGDLCVPLLCKMEHSEKLPEHDPDFHRAIYQQCSFAFQRKVLESLTEIYITYAAARLTTRGTENIREVIQAAALRDEQKVQQVLQSYYAVLLDGMMTDMLGLKPIQLLPARERVAAALRKAIISKQISEGEVLTLENTAQELGVSITPVREAFQILARDGLIELKQSKGAVVLGINETTIREHYQVRAALESAACALCCENDADLEGIRNALKVAEESLKEGDSSNFADYNQSFHYEIWKASGNKKIQKMLAELWNGLSIGAKSTVEEYAHRSHKEHKDIFAALEKRDAGQVRELMDYHIRRSMEDVLTRYQMSPSTITLLFLLFAVVMFVLEKIPLGVTSMIVCCGLVVTGVLDVKTAFAGFIDSNVILFVAMFIVGGALFETGMANKIGGIVTRFAKTEKMLIIAIMVIVGLMSGVLSNTGTAAVLIPVVIGIAAKSGYSKSRLLMPLVFAAAMGGNLSLIAQSGLAEIGLSFGFFEYAIVGLPILICGVIFYATIGYKLLPDKQGGEVAVEEVRDFSDVPKWKQVLSVVILILTLAAMIFEDKIGIKLCVSGCVGALALIVTGVISEKDALKSIDLKTIFLFGGTLSLASALSETGAGEMIAQKVVGALGDNPSPYILTFVVFILCCVLTNFMSNTATTALMVPICLSIAQGMGADPRAVLMACVIGGSCAYATPIGMPANTMVIGAGGYTFMDYVKAGTPMIVIATIVSMIILPIAFPFFPMSKQAQVEKLTDYMANFVSYIGKVLPDDIIVKLDELAEKEDSPLSKTIYQTMKLNQKLAKELNRPSCQDTGVLQFWVKCGTQFPLIGELEALLKEAVVKATFEAPLRHNSVETFDEYNTGKNVGKGTPTVFWDIVPDSDQCEIYAYMAGGGCTLPGKAMVLMPGAGYEGVTRFVMDVMTSYGLNACPPLLVGVGVATSVETAALLSKKALMRPLGSHNENERAASMEKLLEDGINEIGLGPQGMGGKYSVMGVHIENTARHPSAIGVAVNVGCWSHRRGHIIFDKDLNYTITTHSGVTLMVEMKDGKKILTTPISAEDLADIHVGDIIYLNGSMTTCRDVAHRRLVEEGRELPVDVRDAAIFHAGPIIRPLENDKFEMVSVGPTTSMRMEKFEKEFVENTGVKVIIGKGGMGPNTEYACKNYKAIHCVFPAGNAVVAATKVEEIVDAQWRDLGMPETLWHCRVNEFGPLIVSIDTDGRNLFEENKVIFNERKEKAIEEICKHVGFIKMSQVKTLSARERIEGLLDAGSFIEIGASVHARNTDFNMPEKQTPADGVITGYGTIDSNLVYVFSQDASVMGGAIGEMHARKIEKIYELALKMGAPVIGMYDCAGLRLQEATDALDALGRLYRQQTAASGVIPQYAAVFGQCGGGTALLAALSDFTFMVKDTSALFVNAPNTLDDSCGAAERYAGAEFQGRETGNADFVCENEEILLAQLRELVLMLPFNQEDVLDYDVCEDDLNRKIADYSGTGDVAQVLKDITDVGRYVEVTAGYAREMVTAFVKLNGLTVGAVANRTEILDENGEAAESFNGKLTTEGLQKAADFIRFCDAFSIPVLSLVSATGFDTTVANEKSVAREAARLIHTFADASAPKVTLLTGEAYGSAYLTMNSGHIGADLVYAWPTASVGMMPAENAVKIIYNDEIDASDDAQGLIAEKAAAYAALQTSPESAAGRGYVDAVIEPESTRQHLIAAFEMLYSKRAVRPSKKHSTLMKKKLMACEALLLPTLALTGCGSQFGDKMVRAGMNTLMGMGTVFVVLIFIAFLISRFKYISQLENWFRNRKTKNEQAVTETVAEEPAADEKEIDETDDLALVAAITAALAASLETSPDKLIVRSIRRKNTNRWMKNYIVTVNGVSYEVSVEEVGEGQAAAPAAAPVKAAPVKAAAPAKKAKASGAAGSVKVSAPMPGKIIAVKKDAGAAVKKGEVILVLEAMKMENEIVAPQDGTVASVNVGAGDAVEAGDVLATMNMDYIFTTLGNLVHQTAFFNLTVGNFIMIFVACFFLYLAIGRGYEPLLLVPIAFGMLLVNLYPDIMKTVEEAAADGSTSAGLLHYFFLGDEWGIWPSLIFLGVGAMTDFGPLIANPASFLLGAAAQFGIFFAYIGAMCLGFEDAAAAAISIIGGADGPTSIYLASKLGQAHLMGPIAVAAYSYMSLVPIIQPPIMKALTTKEERSIKMEQLRPVSKLEKILFPIIVTVVVVLILPSTAPLVGMLMLGNLFRESGVVKQLAETASNAMMYIIVILLGTSVGATTSAEAFLNWTTIKIVALGLIAFAVGTASGVLFGKIMCKVTGGKVNPLIGSAGVSAVPMAARVSQKVGAEEDPTNFLLMHAMGPNVAGVIGTAVAAGVFMAIFGAMSEIKKKPVGITETILRDAHQSQIATRMTTEQMLPIIDKMDQVGYHSVECWGGATFDACLRFLKEDPWERLRKLRDGFKHTKLQMLFRGQNILGYRHYADDVVEYFVQKSIANGIDIIRIFDAFNDLRNLETSVKACKKEGGHAQIALCYTLGEAYTLDYWKEIAKRIEEMGADSICIKDMAGLLVPYEAEALVKALKASTKLPIQLHTHYTSGVASMTYMKAVEAGCDIIDTAMSPFALGTSQPATEVMCETFRDTPFDTGLDQKLLAEIADYFRPIQEEALKSGLLNPKVLGVNIKTLMYQVPGGMLSNLVSQLKDAHAEDKYYDVLEEIPRVRKDFGEPPLVTPSSQIVGTQAVLNVLMGERYKMITKESKALLHGEYGQTVKPFNPEVQKKACGDETPITCRPADLLKPELREMEKEVARYKQQDEDVLSYALFPQVAVDFFKYREAQQEKVDPTRADTKAGAYPVMGEIVIASACRTAIGTFGGTLKDVPAAELGAIVVKEAVKRAGIKPEMVDEVIFGNVLQAGLGQNIARQVTLKAGLPIETTAMTINIVCGSGLKSVALAANQILAGESEIVVCGGTENMSAAPYAIPSARWGARMNNSKMIDVMVNDGLWDAFNQYHMGITAENVAEKYGITREMQDEFAVASQSKAEAAIKAGKFKDEIVPVVIHGKKGDTVFDTDEHPKFGTTLEKVAKLKPAFKRDGGTVTAANASGINDSAAALVVMSKEKADELGIKPLATIVSYATGGVDPSIMGVGPVPAVTKAMARANMTVDDFDLIEANEAFAAQSLAVAQDLKFDMSKVNVNGGAIALGHPIGASGARILVTLLYEMQKREDAHTGLATLCIGGGQGQALIVKKMDTSADVLQLIEESYKTFSKGQRYIADYICNNYDKAVDMTAARLGKIVGVSESTVVRFATELGFKGYPQFQKALGELVKQRLSSVQRISLAYERLSESPDLISSVLHNDIQNLKHTEEMIDRDAFYRAVDLIGDARKIYVIGGRSCSTLASFLNYYLSYIFDDVRLIRSDSVTESIEEIHRIGEQDVILAISFPRYSVKTIQTVSFAKNRKAKIIAITDGEQSPLAKYADCSIYAGSDMVSFVDSLVAPLSVVNALLAALSMRYKDSVTDTMLSMESIWNTMNEYERIDMKKIIIVGGGAAGMFAAVSAANEYTEVHIYEHNEKLGKKLFITGKGRCNITNGCDDVEELLSHVVTNARFLYSAFYTFSNQDMMQFLTEQGLELKTERGQRVFPVSDKSSDVIRTLERVLKDRHVQVHLKQQVCDLWIEDNEIRGIFLSGGEKVEADVVILAAGGVSYPSTGSTGDGYRMAEHAGHHVTPRVPSLVPMVVDDAWCTELQGLSLKNISFSLRCGKKEFYREFGEMMFTHFGITGPVVLSGSTRIAPYLKKGTVTAEIDMKPSLTEEQLDARLLRDFDKNMNKQIRNALSELLPSSLIPVIIRLSGIDPYMIVHDVTKQQRQKLIHTMRHLTMTVTGVRGFNEAIITQGGIRVKEVDPSTMASKLVKGLYFAGEILDLDAVTGGYNLQIAWSTAYLAGRSAAEAITEMSINVAIDGPAGAGKSTIAKKLAKELDYIYVDTGAMYRAMALYMIEQKTDIQHMDAVRSACDAITIDIRYSDGEQQVILNGRNVNDFIRTEAVSEMSSKISAIPEVRAKLLSLQRSLAAASNVIMDGRDIGTHVLPNADVKIFLTADAHVRALRRYEEFTAKGINCTLENVEREVIERDERDMNRAIAPLKQAEDAVRVDTSQMNIDEVVNCLRQLILDRIMKNVILAKTAGFCFGVRRAVDMAYGIAGRDKVYTYGPIIHNETVVEDLEAKGVKVVHSIEEAAALAGGTMIIRSHGVSKEEIDLLKQMGFDIVDATCPFVKKIHHIVEKYSEQGYGIIIIGSADHPEVQAISGWCKEPPVIIESEEEARNFKTDPDKKLCLVSQTTFNYNKFQLLVEIISKKGYDIRCLNTICNATEERQSEAREIAGRVDAMIVIGGRQSSNTQKLYDICKNECKNTYYIQTLVDLDLKTFESIGNVGITAGASTPNNIIEEVHTNMSEMGNEQSFEQMLEASLKTIRTGEVVEGTVIDVKEDEIILNIGYKADGIITRNEYSNTSNLDLRTVVNVGDTMQAKVLKVNDGEGQVLLTYKRLLAERGNKRIEEAYNNKEVLTAKVANVLDGGLSVVVEEARVFIPASLVSDTYEKNLSKYQDQEISFVITEFNPRKRRIIGDRKQLILAEKAQKQKELFEKINIGDTVEGRVKNVTDFGAFIDLGGADGLLHISEMSWGRVENPKKVLKVGDTLKVLIKDIQGEKIALSLKFPETNPWLTAADKYAVGNVVEGKVARMTDFGAFVELEPGVDALLHVSQISRDHVDKPSDVLSYGQTITAKVVDFNEESQKISLSMKALDAKEETEEMQPYYAIKLKCFVLRLMMGCSLLLISAGIVVSILQEVMNSYDANSRLAYILGLLICALMVALGTVLIYQAFHFERFVFGRSQRSYDLLKKDMQDKSVVSAGNLIVTDQFMLLFSKHIFNMCKVIRLENVIACFEDPVYGTVAKPSEYTLYIYDRDFKCHTIVLDAKQSETGHQAKQKICQTHPWIYAVSRDTFLDRTMSKNSRRNFLNQIEKRKYEMNSTVNVDKEAEAEIDQMVNDARKKLDFHSILGKNKKDAESKKKMLTFDTFYPSDIHITDQTLLLNIETTGLSPRNAFVFMIGLGWQEEKGWHFQCLLAEKKMDERELMQSFQQILENFSQVLTYGGHSFTYRFLNNRWRNYSDADCFSSEDTANLTLFQSVRQLDIQKDISPFRHLLSLENTRKATAEAFIRYTRPEHLAPEALVKCYTSWELSKEDTLLLQLKSHHEADMIGLLHLHSLSAYTQFFRGRFAKVHLCRLEENFCHLALILETPVPQRVQLSNALLSLSLEKDTAHLVIPVLSGELKYFLPGPVKDYYYLPKEDRAIHRSIACYVDKAYRQKATAATCYIRQEGIFLPSFDTSLQPTFKKSFDDKQLYILCDTEKLTSDPAFLRSYISSLIKEVASVMIAFIQGELCDAGQDTIVVACHGIGYEIQIPVSVAQVLPDPGNVVKIYTYTYVREDALGLFGFLTQDDLKIFKLLITVNGVGPKAALAILSAMTADELRFAILAEDAKAIAKAPGIGPKTAKRMIIELKDKLNLESMIEGHGDAEMSLSDPGDAAANVRDEVIMALTALGYGNTEAVRAVRAVSGADEMDSETLLKQALKKIMIFMAKRIITTEFAEEDVKIENHLRPQLLKDYIGQQKVKETLSIYIEAARQREEPLDHVLFYGPPGLGKTTLAGIIANEMGVKMKVTSGPAIEKPGEIAAILNNLSEGDVLFIDEIHRLNRQVEEVLYPAMEDFAIDIVIGKGAAARSIRLDLPKFTLVGATTRAGLLTAPLRDRFGVVSRLEFYSTQDLMTIIRRSAEVLHVKIDERGAEELARRSRGTPRLANRLLKRVRDYAQVCHDGVITLQVANEALDLLDVDKYGLDQSDRNILLTMMNKFRGGPVGLDTLAAALGEDSGTLEEVYEPYLIKNGFIQRTPRGRVVTELARAHCGIPADASMASKTDVQVLLGGKVYTLSGYESEEYLQKIALYINNKMTELNQMPGYKRMGSDMQKTLLELNMADDYYKARKRISELEADLEDKDKAEYDLKHELISAQIQLDESTKKIDQLKDEINELQKQIVKLEAKAERQNDMREIEVLAPAGSFDTMKAAYKAGADAVYMGGPMFGARAYADNADAGQMLSAIDYAHLHGRKLYMTVNTLLKNTEIEGQLEDYIRPFYEQGLDAVIVQDLGVMEMIHTLFPDMAIHASTQMTVCGTDYGKWLRDHGASRIVTPRELDLSEIADMKQQTGVEIETFVHGALCYCYSGQCLMSSMIGGRSGNRGRCAQPCRLPWTFRSDSREKSGYLLSPKDLCSLQLLPDLIDAGVDSLKIEGRMKKPEYAALTAYLYRKYTDLYLTGGREHYHVDQADLEQLMDLYNRGGFTDGYFYRHNGQEMMSVKRPNHSGLNIGQGRINRRGEMEIQPMKALGAGDVLELPDGQSVKLDKAVSVGGQLKVKYTGKPFKQTCSVMRTRNQSLIQSVTEQYVKNSDLKEKLYGYVSISKDLPARIDVYYRDMHVCSEGAIVQPAQKRPLTEEEIRRRLMKTGGTPFEFDQLEIFLEEDCYMTVQELNQFRREALDTVERAVLTPFRRQQPSILQSSNDSRKREKRPVSISVLASSRAQVLAASKVDGISRIYFNYEGNDNLAVEAAAMTHGAGKEFYLAMPYILRNDTKKQCLSKIQKLKSTTDGFLVRNMETLLMLRKAGFDQPCISDYNMYCMNDRAGRVYEQMMDQMTLPVELNRREIAGLLSAVNSEMIVYGYQPLMVSAQCLMKTTGKCTKEPGYYELEDRRHKKFLVHNVCAFCYNLIYNSVPLYLMDVLDEATESGIGGVRLQFVNETGDTVRAMAEACIRALQGERVTAAGDFTKGHYKRGVEMVNVITQLFKYMVALIMAIYTIRCFTVFSVKKEKKKRRIYRSQNFLMLWIHLMLYTIIFLNEKSMYVLVFYGAQLCFFIVALFMYNNIYRNASKLLINNMFFLMMIGFVMLTRLDMTLAVKQFLIAVASVAFSLTVPVIVEKVGFLSRLGIVYGIIGLGVVGSVFIFGTKVYGATNWISIAGIGFQPSELAKIIFVFFVAAMLYKNTSLKQIMFTSALAGVHVLMLVVEKDLGAAVIFFVTYIVMLYVATRRAMWPLMGLAAGAGASVVAYHLFDHVKRRVVAWKDPWGNYNDAGYQIAQSLFAIGTGGWFGMGLYQGMPKDIPVRESDFIFAVIAEELGGFFAICLILVFMSCFIMFINISLRLTNNFYKLLAIGLSIAYGFQLFLCIGGVIKFIPHTGVTLPLISYGGSSILSTIIVFAVIQGLYLLKQKEVKEIEEKRRESEQRQWNDQTRVMYKKASLDDTVVNVRKDSSDDFDLLSDDGMMDYVPGVDDVDHFDFDEKDIEHYRKVNEQEAAERDRRRKQRALEKQRTAQKQQCETKKSDEQPQGKRQNKQAAKAVADEVPVKKTNTKKKKRRRRKDEETDIDDIELRRELSEKKRTNKEIMRITYVMMLLFFGMIGYFIYFDGVTSKEVINNPHNSRLAKMADSVVRGEILSADGEVLAESIKDDNGNYYRYYPYGCTFAHVVGTSDVNKSGVELTADYNLITSDIQPVEKIINEIRGQKNPADNVVTTLNANLQQVAHDALGDREGAVVAIEPSTGKVLAMISKPDYDPNSLVDNYQDIISDENSKVLLNQSTQGLFVPGSIFKMVTSLAYLRSGGDPDNYSYYCDGSISLQSDSGDSYIKCYDGEEHGQVDLLESFAESCNASFANLGLSISVDKMNEVANSLLFNQTLPTKFTTAKSQFSLSNTDSQWQIGATAIGQGNTVISPIHAAMLVSAIANGGTLMKPYVIDSVQSTEGSVIEQYESENYGTLMSASESSQLTKMMKAVVEEGTGYKLSGKNYSVAGKTGTAEVVGRGNNAWFVGFAPADDPKIAICVLVEDAGTASSEAVPIAGEILDAYLNNMTKATSCGGVVIFRGKILLLYKNYRNKYEGWVLPKGTVEAGEEFKETALREVKEETGVDASIVKYVGKSQYSFNTSQDVVMKEVHWYLMMSDSYFSKPQREEYFVDSGYYKYHEAYHLLKFTNERQILEKAYSEYIEFKKSNLWGRKKYYMLREVDLNKNLTKKEYKEMMDKLAPKFAALQREARAKGLPVMVVFEGWGASGKGTMISRLIQPLDPRGFKVFTIQAENEEEHMHPFLWRFWTKTPSKGRMHIFDRSWYRRVITEQMDAPMDQKRLDAAYQQILSFEEQLSADGTLIIKFFLHISADEQEKRLKKLERSLETKWRVTKADWKHFKQYKAYLPMYDHMLEQTDMSWAPWHVIEATDREYAAVKVMTIVAGMIEERLNEENAKESRSHLAERAQEELPGTEETMRTTVLDGVDVSLTMTKEDYKKRLSVLQKELTRLQNEMYLKRIPVVVALEGWDAAGKGGAIKRLTEPLDPRGYEVVPTAAPNDIEKAHHYLWRFWRAMPKDGHMTIFDRTWYGRVMVERIEGFCSQAEWHRAYREINQMEQNLTDHGVIVLKFWLQIDKDEQERRFNERMEDPEKQWKITDEDWRNREKWDAYVKAVDEMILRTSTTYAPWTIVEADSKYYARIKVLETVVRALKNRIMKSPLGDRESRRNSSAGEENIAMNRNSILIIILSVVVVVAAIAGLVMNLGSKENKGTAANSGSLTAESTISVDENTNALQENQYPAVNELIANYRKAFKESDTDLLKKVYNSDQEINADVLTATSQIIEDYQNTQYYTKRGLNSGEYVVFVYDELKLADIKTLAPNLSVFYVKSADDGTLYIYRGDYNAATGSFQYDEDTQNYINQLYQDQDVMDLISTVNTKMDSACANDSSLMEFMQKVRSKTSVTNSASTDTSDTSSTESGQSETESAAETESAGETESQTDSSTATQNMSNFKKDILHENEDKSDVRLNRFLSDAGFCSRREADRLIEAGRVTVDGTKAELGTRVRPGQVVKVGSKVVRQNDRMVLIAFNKPRGIVCTTDRVREKNNIIDYIHYPERIYPIGRLDKDSEGLILLTNDGTIVNHILKASQYHEKEYIVRVNKKITDEFIQGMSKGVPILDTVTRPCTLRRIDDYTFSIILTQGLNRQIRYMCRHFDYHVTKLKRVRIMNIRLGSLPVGKWRDVTAEELEQLKRQFIANNRRNQSKRRKRIMNREEYNTLIKTINYHMNLYYNQDESEISDYEYDQLMLQLKAAEKEHPEWVTSDSPSQKIGGTAKREAGVKVTHDVPMLSIEDVFTKEDIVAWVEKVKAVHPECQFSVETKIDGLSMTLRYEKDENGLLRLSLAETRGDGLVGEDVTANALVVPDVKKYLKLPYDALQLRGEVYMSHSAFEKYNDEQEKTGKKLAANPRNLAAGTLRQLNPAITKERGLKMFVFNVQQGPEEVMESHCDAMDFLSANGIPTVFHKKCTTVDEIIQAIDEIAEMRDKLEYDIDGAVVKIDQIQYRDDFPAGSKYSSGHIAYKYPPEERVVVMDEILVDVGRTGKITYTGVFHDEETEKPARLCGTNVSRATLHNQDYINEMKIGIGGSYKLFKSGEIIPKLNGCVKTPKVVFKTPTRCPVCGSGLINEEDTADIRCVNVLCSAQLARTLSYFCSLDAMNIVGLGDSIIDALIKNGYVKTFADIYKLKDLKDELIRNNIFGKEKGTGRVLEAIEKSKTNDPTKLLTGLGIRNVGKNTAKSIMKHFSSIEELMNASYEDLIAIDDIGGVTATCIRQYFDNPKNRTVIDELESVGVTMKMPKGSTSSEKLAGLTIVVTGVLPTLGRKEASDLIENNGGKCTGSVSKKTDYLVAGEKAGSKLTKAQALGIPIITEEELLNMISMATGFIQLNENDTKELRKEIGLPVTTSEDYSISNVNNKDELVEVGDLDEGWQGKLLSKFGKLESEFGLMEHSFSIMANAGKDGKISSYAICVYEPDLVEDRRDSSRNTVLARVKEDVLKSNTDIVEVYSKYFGKNDEKKRYDKDSDDFINCLMECMRFGINNYIPKAAGFACCSRYKECSDAKECIHPNRLYAKACQYRKNLEEGNIFYMDHLVYLDHAATTAARPEVVEAMLPYFTEKYGNPSSIYSLGSETKAAITHAREIMAKSIGTTSENIYFTAGGSESDNWALVATAEAYASKGKHIITSKIEHHAILHTCDYLASRGYEITYIDVDENGVIKLDQLKAAIRPDTILISVMFANNEIGTIQPIEEIGAIAKEHGILFHTDAVQAYCQVPIDVDKMHIDMLSISGHKINGPKGIGFLYIRKGVKIRSFIHGGAQERKRRAGTENVPSIVGLGKAVEMAVADMEERTSKEIELRDRMIDAIYKRIPYARLNGDRTRRLPNNVNFSFQFVEGESMLIMLDMAHICASSGSACTSGSLDPSHVLLAIGLPHEIAHGSLRLTLGYDNTQEEIDGVVDEIEKIVARLRSMSPLYEDFIKKTGGNKMYSEKVMDHFQHPRNVGEIENASGVGTVGNAKCGDIMRIYFDIDENQVIRDVKFKTFGCGAAVATSSMATELVKGKTIYEALEVTNKAVMEALDGLPPVKVHCSLLAEEAIHAALWDYAEKNGIKIEGLQKPKNDISEGEEEEDYMASKKVVVGMSGGVDSSVAAWLLKQQGYDVIGVTMQIWQEEEDEIVEENGGCCGLSAVDDARRVAERIGIPYYVMNFREVFREKVIDNFVSEYEKGRTPNPCIVCNRYVKWEALLEKALALGADYIATGHYARIVHLPNGRYAIEKAAFDRKDQTYALYNLNQHQLAHTLMPVGAYDKSEVRRIAGEIGLSVANKMDSQDICFVSDGNYQAFIEDYTGKKLPEGDFVDKNGKVLGHHRGIGAYTIGQRKGLNLAMGHPVFVTDINPEENKIIIGENDELFQRALYASNVNLMSRASLDEPVRLTAKIRYAHKAAPCIARQLPDGSLYVCFDEPQRAITPGQAVVLYDGDLVAGGGIIEKIAPELDDASMAVKVAINGFGRIGRLAFRQMFAAEGYEVVAINDLTDPKMLAHLLKYDSSQGRYAGHTVTVGEDNASIVVDGKQITIYKEADASNLPWGDLDVDVVLECTGFYTSKAKAEAHIKAGAKKVVISAPAGNDLPTIVYSVNEKTLTADDKIISAASCTTNCLAPMAKALNDYAPIQSGIMSTIHAYTGDQMILDGPHRKGDLRRARAGAVNIVPNSTGAAKAIGLVIPELKGKLIGSAQRVPVPTGSTTILTAVVKGSDVTVDGINAAMKAAESDSFGYNEDQIVSSDIVGITYGSLFDSTQTMVSPIGDDLYQVQVVSWYDNENSYTSQMVRTIKYFAELAMLNKVSVDDINVKGQRVLVRCDFNVPLQDGKITDENRLVASLPTIKKLIADGGKVILCSHLGKPKGEAKPELSLAPVAVRLSELLGQDVKFAADPEVVGPNAKAAVAAMKDGDVVLLENTRYRIEETKNGEAFSKELASLCDVYVDDAFGTAHRAHCSNVGVTQYVKTAAVGYLMQKEIDFLGNAVNNPARPFVAILGGSKVSSKISVINNLLDKVDTLIIGGGMAYTFMKAQGGKIGTSLCEDDYLDYANDMIKKAADKGVKMLIPVDTVTADAFSNDANVKVVDAGQIDDGWMGLDIGPKTRELFANAVKDAKTVVWNGPMGVFEMPNFAAGTVAVAQALADTDAVTIIGGGDSAAAVNQLGFGDKMTHISTGGGASLEFLEGKELPGVAAATDKMRKKIIAGNWKMNKTPSEAVALVETLKPLVANDDVDVVFCVPAIDIIPCMEAAKGSNINIGAENMYFEESGAYTGEISPAMLTDAGVKYVVLGHSERREYFAETDETVNRKVLKAFEHGITPIVCCGESLTQRKQGIYIEWIRMQIKIAFQNVTADQAKTAVIAYEPIWAIGTGETATADQAEEVCGAIRQCIREIYDEATAEAIRIQYGGSVNAGNAAELFAKPDIDGGLVGGASLKPDFGKIVNYNKMSKKPTVLMILDGFGLNDKKDANAVYEAKTPVIDNLMATYPFVKGNASGLSVGLPEGQMGNSEVGHMNMGAGRIVYQDLTRITKEIQDGTFFENPALLKAIENVKANNSALHLYGLLSDGGVHSHNTHLYGLLELAKRHGLEQVYVHCFLDGRDTPPASGADYIKELYEKMQELGVGQIASVMGRYYAMDRDNRWDRVEKAYRAIAFGEGIQAECPYDAVKASYEKEVYDEFVVPTVIMRDGKPTATVNDGDSIIFFNFRPDRAREITRAFCADEFDGFDRGERKKVTYICFTEYDVTIPNKEVAFNKVEIKNTFGEFLASKGLKQARIAETEKYAHVTFFFNGGVEAPNPGEDRILVNSPKVATYDLKPEMSAYEVCDKLVEAIKSDKYDVIIINFANPDMVGHTGVESAAIKAVEAVDTCVGRAVEALKEVDGQMILCADHGNCEQLVDYTTGVPFTAHTTNPVPFILINYDPAYTLKEGGCLADLAPTLIDMMGLEKPVEMTGHSLLVKRMSGIRIAATVVYIIVCLVLVFLVFKGKGQGADLSGGITGRSNDTYFTTHGKKHTEDALLERSTAILAAIFIVLSLVMNMSWGYMDKVIFDVRRKMVLDFIEEKNYKPMKFKELCMVFSVPKREKEEFKEFLDQLIAGGELTLTENGRYKKAEPDTFTGKFCGSTRGFGFVTVEGMEQDVFIPADETKGAFHGDTVLIQLVAPAVPAGGTRAAKRAEGKVLQIVERGFTEVTGIFQKNKNYGFVIPDNQKIGSDIFIPCGKTMRAVNGHRVVVKLTDYGNDRKNPEGTVTEILGHADDPKTDILAVVKAFDLPTEFPEDVKTQLLSVPESVSPEETEGRRDLRDRMTVTIDGEDAKDLDDAITLEMKDGHYFLGVHIADVTHYVKEGSPLDKEALKRGTSVYLVNKVIPMLPHALSNGICSLNEGVDRLALSCLMELDERGGIIGHEITESVIRVNHRMSYNQVSRILDGDKELMVVYADAVKMFKEMKTLSDLLRKKRKERGGIDFDFPESKIELNDRDFPVDIHPYDRNPATKIIEDFMLMANETIAEDFFWQELPFLYRSHESPDTDRIKRLMILIKNYGYYMNIRQDSIHPMEFQKLLGKIEGTPEETMISRLVLRSMKQARYTTENLGHFGLAVSYYCHFTSPIRRYPDLQIHRIIKENLHGQLDDGRQAHYHHILPDVAVQTSSTERRADEAEREVEKMKKAEYMSKRIGQRYEGVVSGITNWGMYVELPNTCEGLIRLQDMDDDYYIFDENTYTLTGEDTGRTFKLGEHVRIIVKDVDFLAKAVNFMLEDSIFAEGEMMAGKGTKLIANNKKAYHDYFIEDKYEAGIVLHGTEVKSLRMGKCSIKESFIHADHGEIYIEHMHIAPYEKGNIFNKDPLRTRKLLLHKREITKLLGQVSQKGYTIMPLQVYFKDSLVKVQIGLARGKKLYDKREDIAKKDQRREAEREMKIRLRMRKRRTRYSERNTRYHSRKGQTFQQIILSIVALFLVVIFLVVLCTDPMGNNGSVPPENVMAAKDADETADSNVSQSDESVSDTASADGLDQTSDGQTDSTASSSDWRLLLVNSTHSIADDYSIDLTELRNGQSVDSRILTDLQEMFDAARSEDIYPIVSDAYRTREEQQALMDDTIQNYEDEGYSAEEATSKAEQVIAKPGTSEHETGLAIDIAGDEDYGQDTDSVLAWMNDNAYKYGFVLRYPSGKESVTGAAAEDDHYRYVGKEAAKVMYDKGICLEEYLSQNNMRKCVKCGKVMVSDLRLKVNGGGYGIVVRVDEKQKATIIDDVKVAVCPECGYTEMYLEDLTNLKDMEISSDRGSTPRRSTKTEQVNLCICYYRIQEYVLFGVSKKIKVTTLYVAKVIYSVVIFMLMSRIEIIQLDVRAYLEIQPQFQYNKITRERVRLSCEYRNHECAESDQMDVVPLIEGEPKIGIVPVEPGLTNERQGDKIIGLNTENTEEKEGLIRFDIVFYARMRDGLTQIIINVEAQKDDPDEYDILNRAIFYVSRMVSSQKERDFVHQHYNDIKKVYSIWVCMNNKANTLNHIHLKDDKIIGHRTWAGKLDLINIIMIGLADEVPNHDERLQLHRLLSVLLSMEMKAKDKIKIMEAEYGIPIEDGIREEVNIMCNLGEGLAINYMKRGWEQGLSKGMKEGIERGLKLKYTPMEEKVNFVKWLGQKKSLFLKEGLFAIIFFVTFALYHLPLTAIFYPVLLCFVTGMLFLVWDYRKFAVRHERLQQLSAMPFDVMTDFPESVSVLETDYQQIIVQLQEGQRRMKDEMSFQYQDMMDYYTVWAHQIKTPIAAMRLTLQNTDSFFSRKLSVELARVEQYVDMVLCYLRLDTDTRDYVIAVYDLDDILRQALRKFAGQFIGKKIHLDYQPLNAQIMTDEKWLLFVIEQILSNALKYTQQGCVSIYLESPKILCIRDTGMGIAPEDLPRIFEKGYTGYNGRTDKKASGLGLYLCARICRNLGHGISAESEPDKGTVIKLNLNTAERMFEMYRILIVEDDAGIAEAVSEQAKMWNFETHSVTNFRNVMAEFAEFDPHLVLMDIGLPFFNGYYWCGEIRKVSRVPVIFISSASDNMNIVMAMNMGGDDFIAKPFDQTVLIAKMQAMLRRTYDFAKTEHVLQCREAVLNVDDHSLTYRGEQIALSRNEYGILKILMENAGKIVSRERLMERLWETDSFIDDNTLTVNVNRLRKKLEGAGLKDFITTKFGVGYVIFSDEKGQEMIKIFIGAILALLDFTVTNGSMRFGILPDFIGCFLLYLGFKDIMAAYPKTCQRLATARTTLLVLTVYSAILYVMALTGIGANIAWLETALSLIYYVVLFYVLYLFLQSLYEIETDVSGDLKLEKFKRWWCYMSLFQVLICVLILVLCFRSASVEILFAYYVCAVMALVCEVLYLVRLNGVLNTLQRRHMADFYENKRVTEEVILVGVALGETSVTDESLDELEELAKTAGAMTVGRLIQNREMIHPGTYLGKGKLEELAFLISETHATGIICDDELSPAQMANMEDVLDIKVMDRTLLILDIFAQRATTREGKIQVELAQLRYRATRLVGMRNSLSRLGGGIGTRGPGEKKLEVDRRLIRERISQLKRELEDVKRHREVARQQRQRNQIPVAAIVGYTNAGKSTLLNRLTGAGVLEEDKLFATLDPTTRNLTLDDGQELLLTDTVGFIHKLPHHLVDAFRSTLEEAKYADILIHMVDASNPQAEMHMHVVYETLAALDIKDKKIITVFNKTDLIRDQESLVSLKDFRADYTVTASVKQGTGLDALLSTVQTILRANKLLIERVFDYAHAGEIAVIRKYGQLLDERYQEDGIYVKAYIPKDIYARLSFMENDDKRVRKNRKISKDTESDRSRIKNITNKVHPEYEVPKKRPARRTEEDEEMARKRAEARRKKQHQERRRKIIRRRKQKQALRLVAACLVIAALVVTVFSVKNYNSGSRHDNKGMNAYESGDYDTAVNEFKEAISYDGSNADYYIHLGMAYVEQKSYDEALGYFNQAEGCAENDDQKALLNRGRGIACLYQGDYQTAIKWFGDALNISSQSNDIRIDTLYYKAEAEQKSGDYQAAVQSYGQIIDLKDDAGTRMLRGMAYMQLQDYASAEKDLYGAIKQSRKSYAVYRTLYSALEAQGKDDEAKQVLNDALQLSGSSGEDYYNRGMIYVDLQDYTNAADMLNKSYDKGYKAALLGLGELSYTQQDYDTALTYYGKYFDEVDISSVDASLAAKTYNQYAAVLLAKGEYEKAAQACESGLTYNDRESDAVLSFNLIVSYEHLEQWEDAYNTAKTYVSKYPEDTKGQKEYQFLESRVTQMVNIYETEGGKLNALQDFEEGCWVKVTAATMWEMEPVAKKYNIDIEDMRAALDEEEKSRIVLEDDYTLVLVDIPASEIQHEKKVYTTIPLGLILADGAIITICSEDTPILNTFIKSHVRYFSTKKRTRFVYQILLNSMTTYQNVLRSVDNRRLAIEARIGEEKEDEADLVELHDLESTLVYFETSLRAAGMVIDRLRRYKHIPQFPEDEDLLEDVQVENRQAIEMATIYREIIDGTSELMSNVINNRLNNTMKYLTSITLVMAVPTIISGLYGMNVNTGGMPFGSLKMGFGIICGLTFLLCLFILWILWRKRMLMKKKFMKTCLAAALSAALAIATVAPAFAADFTPKYTYSGDGMTFEKVSHANSPTETADGIVDYTGNGSIAPYVQGVSADGNGDRGQSYSYASASYGDWVYINTMYGGLGANAILNRGLGELTPDAAAALINIMYNGTMYTGEPDGKSAGGMLVKFNVKTGETRILMSKDTNGIMPTFRSAIKLNNKLYFVGMIIDANNKQLTSQEIAYATAVQNGFPCIYEVDPANNDKLTCIYNCVDTNGFRQLVKDNVFTSTRAIGTYEGAMIAGALDTNGVFLVASKDPSQGQSSFSVIADMNDLFNYPAYHRSDVNGGGGIYQVLEYNGDLYVVICTGTPNNKNEATGTLQTFAIVKGTCSGDVTDKNAWTWSVLAGDEADGARYPFGLDTERVSAGACTLQVYNDYLYIGDYNDVSSALQGFVLKNEFTTQATNLEQSVNLYRMDKNENIEKVVGDPTEAFPTSLSGLGSGYTSNSLLKKMGTHMNQYTWQTTVYNGKMYVGTMDTTTLLEPLAKYTNGDILEMTRDEWISQINYIKVMLKLLFKTPVTSSMSAESVVPVETSAETESAETAAETIAAEESETEAAVETTIDDILSSDTAAVQTQTEEGIAVQAIETDTAIEDNAADSDADIEVAVENLDDAQPVAVSPTEEPLTESSARVLVEAAIQEVQNDAAQSLADNDQSTDAITLTDEQINSLVSGLLDGNIAPQSMDEQLYNQLVTVNDKLMSIASLVDSNDIEAFVTVYTAMSDIIDQINDRIPENVKALYATVIKYATKENLKGLASSLKYMRTSEAGFDLFEITDNGSAGVSIKKVTTNGFGDRYNHGLRIFEKTDDYWVIGTANPFNGTQLWRTTNLEKNTDIPDSTETETPETDVKPGLMPKPSTTKPTTTVKKPTTSAKKATAKKAAVKTGDESNSTQFIVLMGISAATIFILGYRLRKKENMADQKIENLLNLAAGSTNSEKEKSENLGVGFDPQTDTWEIIVKYTGDILSLANRYPGIRIVPLLGQYAIVTIAEDQLDDFSDEEVITYIEKSKQLVFTVVQGRIASCINPVQAPPLQLTGKGVLTAVIDSGIDYTHRDFRNPDGTTRIHALWDQAAQGMPPEGYDRGALYTKEDINNALAAETAEERKRIVPSEDRSGHGTAVAGIMAGNGSSSDGVNRGAAPGSELLVVKMGMTNERGFPRTTELMLGLDFVIREAIHAGKPVAVNVSFGNSYGAHDGSSLLESYIDTVSQIWKNNIIIAAGNNAVSAGHFRAVMISEKTLDADISVSEYERSLNVQIWKYYGDEADIEIISPSGESSGQIKKILGPQRFRLENTEILLYYGEPAPYSINQEIYIDFIPQRQYLAGGIWTIRLLPGRIIRGDIQMWLPTAGVLNQNTGFLRPDPDLTITVPGTAKKAITVGAYNIWLDDYADFSGRGYMGAFASVKPELSAPGVDITTTLAGGGYTVVSGTSFAVPFVTGAAALLMEYGIVRKNDPYLYGDKLKAYLLAGARPLRGVSIYPDIRVGFGALCLENSFPDMSLVKAEKYLQEKGFLDHVIELEASTATVAEACVLSVLVIMTKDMTEGNALGLILRFALPLLVGNLLQQTYNMIDAAIVGRFLGTQALAGVGATSSVQFLVLGFCTGLCSGFGVPVARDFGANQFGRMRKDIFHGALLTAVIAVILTTGCVLLCPWILKMLSVTEDIYGNARIYILIIFLGLPFTLLYNFLSSILRAVGDSRTPFLFLAFSACLNVVLDLICIIVFKWGCAGAAFATITAQAISGLCCLIFIIKKVQILHPKRKDCHLQPVYVKEMLVMGLPMGLQFSITAIGSMVMQSANNGLGSIYVSGFTAGMRIKQFAMCPFDALANGVSVFCSQNLGAGKIKRIRKGLWQGVGVGFIYGLLIGLVLIFAGRSLSMLFISADQTAVLDASAKYLRCLGFFYWSLGPLSVFRMSAQGMGFSGRAIFSGVTEMIARTFVSFAFVGTYGFTAICFADQTAWVSATLYITPVCLMCLRQVTREHERQQAKIADMNERFTLDSTVTEISENERVNKKLPIFFDLALCSQIKWPFSKMKLKNMMKMTKFPGQELVDAANFILERREAGDKITIPIWRGLPENEAEAAEYVVLIPFISDEENRPAILICPDWENGRQRMMDEGMKMAKTIVELGCQAFILNLRKESEADDMARALRFIRANHEKLHVEEDKIALLTFGEMKAAARKLFFHSKRIKDVTHRYDALKCEPEELWIMGASDEDADKTGVFFSGSHYSLADDSREWLETRIRKLSENAEIEEKINEGEQAEMKIKRIFAIIAVVLLVALYGSTIVFALSDSPNAVYMFKASIFCTVIIPIILYSYILVYRVLGKKESDHTDDAKDIPKKMAIGEPSGECYEKIKLHSNHLLDCYDVIIRINCVQIMSLRMFYQEEFVKARMDRKDGNQMSESYTENEEVFADIVISGRIFESDGRARNGALAVKDGKYLAIGDCDEISRYIGLDTIMCGYKNKSVLACLYSQATGDNVHEMGAAYQPSGEYKIMSGNLTMKVGDQANLTVYDEKVDVYSELEQSESKVLMKIENGEIIYRRRNPGNRTCAGMHFHPMISAQVTIHTPHGLHLRPAGELAEEALKYRCRVSLAHGDKEISAKSLLGILSLCIRQDTEITVVCDGMDEQEALEGMVQFIEHLMTIASCESGDFMRANGEYEQNTSESNQTQVHPDVVAYVASHMPDQDDLIDVAELFKAFGDLTRAKIICALAQSEMCVSDLSVLLEMNQSAVSHQLRMLKQVRLVKTRRDGKVRYYSLADEHIQKMFQVAFEHIMEDMEPVRFEDLGVDERILRAVTEMGFEEATPIQAKAIPEVMTGQDIIGQAQTGTGKTASFGIPMLQKVDPKNKHVQAIVLCPTRELAIQSADEIRKLAKFMHGIKVLPIYGGQDIVKQIRSLKTGVQVLIGTPGRVMDHMRRHTIKLDDLKIVVLDEADEMLNMGFREDIETILSQTPEERQTLLFSATMPQPIMEIARTYQKNAKIVKVVKRELTVANIEQYYYEVRPKNKEEVLSRLLDIYNPALSVVFCNTKRQVDELVEGLKGRGYFAEGLHGDMKQQQRDRVMNGFRNGRTEILVATDVAARGIDVDDVDAVFNYDLPQDDEYYVHRIGRTGRAGKNGKAFTFITGREFYKLKDIQRYCRTKIIAKQVPSLNDVANVKADKIFEKVAGMIDEDNLKPYIRMIEEKLEKEDYTTLDLAAAFLRMALGDEDKSVEVDDFGDTGAEDGMVRLFINIGKNQKARPGDILGAIAGETGIAGSLIGTIDMYDKYTFVEVPKEYARDVLNAMSHARIKGRNINIEPANRKMDYKKLYASKLCTAKEAVKDVTSGDWVDYGWCTGHPVALDKALAERMPELEDVKIRGGIALWRPAIFDIENPADHFCWNSWHMSGIERKAVNEGFAFYAPIRYSELPRYYAENVEPIHVAMFQVAPMDEHGFFNFGPSASHMASMCKRAQIIVVEVNQNMPRCLGGFNEGIHISQVTHIVEGDNPPIAEMGASKATAVDEAVAKLIVEEIPNGACLQLGIGGMPNAVGSMIAESDLRDLGVHTEMYVDAFVDIAMAGKINGSRKNIDRGRQVYAFAAGTKKLYDYVNNNPECMSAPVDYTNCIQSVAALDNFISINNAVDIDLFGQVSSESSGTKQISGAGGQLDFVMGAYQSRGGKSFICLSSTFMNKNGELQSRILPTLHNGSIVTDTRANTHYVVTEYGKVNLKGLSTWERAEALISIAHPQFRDELIAEAEKMHIWRRTNKIRMIALCKFLFLFVFGGSIYYGIEMFTRGFSHWSMFILGGICFILCGRLNEKQRGRYTLLQQMFLSMLMITFLEFCAGVILNLWLKLDIWDYSRIPFNLYGQICLPYAAVWFVLSAAAIVADDYLRYWLYGEEKPSYRLMPADLKVARAALHMWEEPCISGKAGSGAIFFSGCSVGCVFCQNHAIAAGQSGKSISIERLADIFLELQTKGANNINLVTPEHYAPSIALALAMAKAKGLHLPIICNCSGYSSLTALRILSDHVNVWLPDFKYYSPELSRKYSHAPDYFTVACQALQFMYEQAGDPVFDDNGIIQKGIIVRHLTLPGCMEDSRKVIHYLHETYGDKIYISIMNQFTPVSELLSDYPELNHTISASDYDALVDYAIDIGVENGFIQEGETAKESFIPPFDNEGVMYNKKKATDKPVGKSSGLNHSSSGKASEKHNFPKQNDSKKASDVCPVHKKCGGCQYQGMAYKKQLSLKQRQANMLLGKFGTVLPIIGMKDPLHYRNKVHAVFAFEKGKAIAGTYQEGTHKVVPVESCLIDDEKSDAIIQTIRELLRSFKIKTYNEDSGYGLLRHVLIRRGFTSGEIMVVLVASSPVFPSKNNFVKALRKEHPEITTVILNVNDQNTSMVLGERNITLYGKGYIVDTLCGHTFAISPSAFYQVNPVQTEILYQTAMDYAGLTGKETVVDAYCGIGTIGIIAADKAKSVIGVELNPASVKDARSNARHNNIGNITFYQNDAERFLNEMQEQNAKADVIFMDPPRAGSTQSFMASAISLNPDRIVYISCNPETLARDLEFFKKHQYTAEKIQPVDMFPFTTHMETVCLLTRRKMGIAAVDMSEKNNKSNSPADNTKSEKKMTKYDLKMQRRQEEEKKAKKEKAIIKTGCILAVIICVCIAAWKFYDNYQEKHGPYITVGDHEIQKAEFDYYYYSSLNSFASTYGSYLSYFGLDTSKPLDQQQYSDTMTWDDYFQQQAVNQLKNVYALTDEANEKGFEYDASSDYDDMVTSIKSYAQQQGVSEDEYCKSVFGSDATLEGIKPYVEMSGLASAYYNDVKDDIEVTDDEINTYYDENKDNYDSVDYRVCKIEADMPEEETETETEAQTETAAESISETAAESTSETAVTETQTETESETMSAEESEAAAKAEEEAKAAAMAAAKAKADEMLSKIKDEASFEKVYDKYASDTTVDSLNTGKKKSSISPTDVANWLFEADRQAGDTTVIEDTSNNAYYVVYFKDRYLDHIKTVDVRQILISADTSSSDAAETDETETTAAGETETAETESAEAQEQAKEDAKAAAKIKAEQILDDWKNGDATEDSFAELAKTYSDDTGSNTNGGLYEAVKKGQMVTNFNDWIFDASRKPGDTGIVESDYGYHIIYFVGDNKEEWYVNIKDTITSNKLNDYMSDLTADIEVKDSRHHVAYLHETEAATETTSDTAASTESAAASESAAEAAASETETVAETTTETAETTAKMKEITLNGKFMASESSAQEYLFDVFDFPEYYGNDLEGFYDALTDITEETHVTIINRECMENTSYGSRLMWVFEDAASDNDNLSLAWTEVSYEEYMTDPYQVLGVSRDASNDEIKKAYRRLSRKYHPDANINNPNKEAAEAKFKEVQAAYNQIINEREHGTSGQSSAGYGGYGYGNSAGGQDFWGSFGGFGGYGSGYGGYGSQQQNQQNQYQDEDSLKFRAAANYINAGSYTEALHVLDSISNRNAQWYYLSALANARMGSNINAKEHARKAVELDPNNMQYRQLLSQLESGGQWYQDMGQSYGMPTINVSDWCCKILCLNAACGCLCPGAGCCGPGVFYYHMFGYITVNRAELKVKESAAYDAYYCGLCHALHGLHGRAGQLTLTYDMTFLVILLNGVYEHEMHEKTGRCLIHPMKKHTERWNDFSSYCADMNILLAYHNLLDDWQDDRKLSRYAAAQLLSKTYRGIREKYPRQHQAVVDYMKALSVCEKSCSDNVEEAACLTGKMLAEIFVCREDAWASDLRQMGFFLGKFIYLMDAYEDIEKDAVSGNYNPFMTIKDHENFDSECQNMLMMQMAECCRAFERLPIVQDAGILRNILYSGVWAKFASVYNKRNKAGENEMEAGIKNEKSIVVTEDVTASKVGSGLLPVYATPSMIALMEGTCAESVQSELAEGEGTVGVSVDIKHIAATPIGMKVRCESLLKEVNGKKLVFEVNVYDEKGLIGTGTHKRAIINNEAFMARLAMLHPSYTELMDAVNSEVKEGEQPIVSSRYSIVIAAAKRARQIIAGAESAVPDYKNKKPLSVAVEELMDGDVKILSSGEDADDEDDKPSIGGDVYDIALDVDDEDIFEDEMKEDSDEDSEDEDDEEKESESDEDMSSEEDDYEMSDQKRGILTIISGFSGAGKGTVVGRLLEKYPERYKLSISATTRSPRNGEEHGVHYFFKSDEEFQQMIENDAFLEYAQYVEHSYGTPRQYVEENLAAGYDVILEIEQQGAFAVKKAVPEAILIFLTPPTIEELERRLRNRKTESDDVIASRLAQACAEAAHVDQYDYIVINDEVEHCVDAVNRLIETEHQRTQFNGAKIQELQRDLQPYRKGEMSRLINIGFGNMVNAAKIVAIISPDSAPSKRIVQNAKDEGRAIDATQGRRTRAVIIMTDDHVVLSALQPETIAGRYQGRDIQEQLTDIEKDEEDEMLKSMTGFGRCEIADKDRKVIVEMKSVNHRYCDITIKMPKKLSFFESAIRSLLKKYIQRGKVDIFITYEDYTENRSCLKYNRELAAEYMDALRQMSEDFSIENDVRTSALSRYPEVLTVEEQTVDEDELWHFLEPAITKACEGLVETRSREGEQLKNDLIAKLDGMLAYVAYIEERSPQIIADYRARLEDKVRDLLGDTNIDEGRIAMETTIYADKLCVDEEIVRLKSHIEATRTTLVNGGSVGRKLDFIAQEMNREANTILSKANDLLISNTAIDLKTDIEKVREQIQNIEMALDGLVISNIVYELSETLTGGRINKIYQPEPDALILGIKNNRTNYKLLISASASLPLIYLTDDTPANPAVAPNFCMLLRKHINGGKILSITQPGLERILHFHIEHLNEMGDVCEKILIVELMGKHSNIIFCQPDMTIIDSIKHISANVSSIREVLPGRQYFIAETQHKLNPLEVDETSFIGKVLAQPLPVGKAIYTMITGISPLIAEELCFRASIDSGASTKALSELEQLHLYRTFEKLKEDIIEHRYQPNIVSDEGTPTEFSSTQLTCYGELQEEDFDSISEVLRYYYAARNAATRIRQRSSDLRRIVTTALERCRKKYALQEKQLKDTEKKDKYRIYGEMLNTYGYSLEPGAKSLKCINYYTNEEIQVPLDSQLSAHENSVKYFDRYAKLKRTWEALSVQIQETKDELEHLDSISTALDIAVSEDDLIQLKEELIQFGYIKRHYSGKKGNKKVRINSKPFHYISSDGFHIYVGKNNFQNEELTFKFATGNDWWFHAKGIPGSHVIVKSEGQELPDRTFEEAGRLAAYYSKGRDAEKVEIDYIQKKQVKKTPGGKPGFVIYHTNYSLLIDPDIRNIQQVKMGKYFGTDGFRGEANKQLTVEHAFKVGRFIGWYYGAARDKSCKVVIGKDTRRSSYMFEYALVAGLTASGADVYLLHVTTTPSVAYVVRTEEDFDCGIMISASHNPYYDNGIKLINDRGEKMTEDVIAEIEAYLDGESGEVPLAYGDKIGCTVDYSAGRNRYIGYLISLATRSYKGMRVGLDCSNGSAWMIAKSVFDALGAKTYVINNHPDGFNINTDCGSTHIHVLQDFVKEKQLDVGFAFDGDADRCIAVDENGKVIDGDLILYVCGRYMKEHGKLTNNTVVTTVMSNFGLYKAFDKVGINYEKTNVGDKYVYENMQQNGHRIGGEQSGHIIFSKYASTGDGILTAIKVMEVMLEEKQSLGKLAEPVTIYPQLLKNVRVRDKKTAREDKDVMDAVDAVADKLGSEGRILVRESGTEPVIRVMVEAPDDATCEKYVSEVVDVIYQKGHAVAQMKDRITGHTVLTGLLGSPVAHSISPMMHNESFRQLGLDYAYLAFDVGTDNLKTAVEGLKVLGVRGFNLTMPDKNLMCTYCDKLSPAAELIGAVNTVVNDNGVLTGHTTDGIGYMEAARDAGYDLTGKTMTLLGGGGAATAICVQAALDGLKEIRVFNIKDQFYGRLEKLTANITARTSCKVTLHDLSDERALYDSIETSDILTNGTSVGMAPNTDACLIKNTDVFRKELIVSDVIYNPEQTKLLKLASEKGCPTFNGLYMLLYQGAAAFKIWTGQDMPVDIIKEKYFTRMFHLVLERIYVGIQTGSIAIGLTLSGFGMLPFIISLEIVSWEIMKCSVWCVLQRMATITAGDFRNGVTFEYDNDVCQVIEFQHVKPGKGAAFVRTKYKRIMNGGIREESFNPTAKFETAYIERKEVQYLYDDGEAYNFMDQETFDQFAMPHEEVEDRMKFVKEEMTVKIMSYKGKIFDLEPPLFVELEVTETEPGFKGNTSTGATKPCTVETGAQINVPLFVEIGDKIQIDTRTGEYLKRVMIQQFYPDEWLDSAYVIDYEKLYKEGYRGLIFDIDNTLVPHGAPADERAIALFKRLREIGFSCCLLSNNKEPRVKMFNEKIGVSYIFKAGKPGKNGYEQAMRKIGTNKKTTVFIGDQLFTDVWGAKRVGIRNILVKPINPKEEIQIVLKRRLEWIILYFYKKTMKKMQSFPQPLSAAQETVYLRQYQNGDMHARDILIERNLRLVAHIVKKYMNSGKETDEMISVGIVGLVKAVNTYNFEKGSRLATYAARCIDNELLMLMRGDRKLSREVSLYDPIGTDKEGNEITLLSILEHEDEDIIDQLDKKQSLRKLSKILSKVLTPREYFVVIRRYGLYGHHETTQRELAEQLNISRSYVSRIEKKALEKLRLQLNMRIPELLVPASSLEVLKTAVIFGADAVYIGGEVFSLRAKSKNFSLEDMKEGIDFAHAHGVRVYVTSNILAHNQDLEGVREYFKELKVIQPDALIISDPGVFDIAREIIPEIDVHISTQANNTNYGTYNFWYRQGARRVVTARELSMEEIADIRKHIPDDLEIETFVHGAMCISYSGRCLLSNYFTGRDANQGACTHPCRWKYAVMEESRPGEYLPVYENERGTYIFNSKDLCMIEHIPELIAAGIDSFKIEGRMKTALYVAVVARTYRKAIDDYLKDENLYRQNLPYYREQIAKCTYRQFTTGFFFGKPTHETQIYDSNTYVKEYTYLGIINGQNSQGMYGLEQRNKFSVGETIEVMKPDGRDLPVKVLRICDEEGSDMESCPHPKQKIYVDLGIELRDQDLLRRAEKSDNMIVNDRLTSYLHSLDSRESEIIEAIGREARADRVPIIRQETGSLLKVLLKMNKPQRILEIGTAVAYSAILMSECLEPGATITTVEKYEKRIPIARENIRRAGKEDCITLIEGDALEVMAGLEPGYDFIFMDAAKGQYIHFLPEVLRLLKKGGLLVSDNVLQDGDIIESRFAVTRRNRTIYSRMRDYLWQLKHMKEFETAVLTVGDGVTISTKLTEMIKKLFVGTFGVALNVIIYILVILLAIRVITWSYDFAYEVFGDRPVAEASEEIVPVQISDGASTNEIAAILDKKGLIKYKYAFIIHVGLSQYKGMLKPGNYELSPSMTMDQMLAVMAGSGTAETSTEMKANKGVSNEKIKIIPLGGLEHIGMNITCIEYEDSIIVIDCGLSFPDEDMLGIDLVIPDVTYLKDNIEKVKGFVITHGHEDHIGALPYVLQSVNAPVYATKLTMGIIEHKLKEHNMMKTTKRKVVRHGQSINLGCFRIEFIKTNHSIADAAALAIYTPAGIIVHTGDFKIDYTPVFGEMIDLIRFAELGKKGVLALLCESTNAERPGFTQSERTVGKTISRIFDDHKKSRIIIATFASNVDRVQQIINAAYEHGRKVIVEGRSMVNIITIASELGYIKIPDNTLIDIDTMRNYPDDKLVLITTGSQGETMAALSRMAANTHRKVSIKPGDTIVFSSNPIPGNEKAVTNVINELYRKGAEVIFQDTHVSGHACQEEIKLIYALTKPKYAIPVHGEYKHLKAGAKLAETMGVQKDHIMLMQSGDILTIGQEKAEITGQVPHGCVMVDGLGVGDVGNIVLRDRQMLSQNGLLIVVLTLEKYSNQLLAGPDIVSRGFVYVRESESLMEDARRVVSDALDDCLNHNISDWSKIKNVIRDSLGDFLWKQTKRNPMILPIIMEVMIEDQLSEFRKLLKERGLKTTSQRMAILKVLLSQPECHLTAEEIYDLVKKDWPDIGLATVYRNIQLLSEMNLIDKLNLDDGYVRYEIGEPNQKSHHHHHHMICVSCGKVFAFQEDLLDNLEQKIEQTTGFVVSNHEVKLYGHCAECRKKDGAKSEMATKTITLTTDDDEEIELMVIEQTMINNVNYLLVTDSEEDEADAYILKETGAETEEAYYEFVEDSTELEVISKVFEQMLDDIDLKYEMKKRIIGLDYGSKTVGVAVSDPLGFTAQGLETITRKDENKLRKTYARIEALIREYEAEQIVLGYPKNMNDTEGERVEKTLAFKEALERRTGLEVILWDERMSTVASERVLMEGNVRREDRKTYIDKMAAAFILQGYLDYQSFSENQAESEDSEDIMADNKNTQYFKVNNETDIAVKDILEAVYIALTEKGYNPVNQIVGYIMSGDPTYVTSYKNARYLIMKVERDELLEELLKNYIEVNLKMKKTVAFCTLGCKVNQYETDAMRGSFEAEGYEVKEFSQEASVYVINTCTVTNMADRKSRQMMHRAKKKNPDGIIVAVGCYVQAAKEQLEEDTLIDLVIGNNMKSQVVQIVEQYIQDNRHTEDRDAYVADIAHSHEYEAMHIETVSEHTRAYIKIQDGCNQFCSYCIIPYARGRVRSRKMEDILQEVRNLTANGYKEIVLTGIHISSYGLDFEHTADEQEDYGPFKNSALIDLIEALSGIEGLERIRLGSLEPRIITENFVRRLCKVPQICPHFHLSLQSGCDETLKRMNRHYTTALYLEKCGILRQYFDRPALTTDVIVGFPGETEEEFAQTERFLETVHFSDMHIFKYSKRRGTKAADMPNQIDPQIQSVRSEKLIALGERMKDDFLEACKDQEQIVLIEEETEIGGTKYMTGHSKNYIRCAFEMDGLVPNMVIKGTINSKLNEEFVFCKRIDMKTVRVCLDSIDKVKGFVNDISRFNTDFDLISGRYVIDAKSIMGIFSLDLSKPIELTIHESDEIDEILKALQPYVVEMYKAFLIKYGEIGIKGKNRYLFEYALMDQIKFSLRKVDGQFEVTKEQGRVYVEALTEYDYDEVIKALSRVFGIVAICPVVLCDNNEWSNLCQVTGDYMERTYPDQHLSFKVFARRADKSYPKKSMEIGADMGEYLLDRFPDMTVDVHNPDVALNIEVRERTYIYSISIPGPGGMPVGTNGKATLLLSGGIDSPVAGYMIAKRGVKIDAVYFHAPPYTSERAKQKVIDLAKIVAAYAGPINLHVINFTDIQLAIYDKCPHDELTIIMRRYMMKIAEHIALEEGSLGLITGESIGQVASQTMQSLRATNAVCTLPVYRPVIGFDKNDIVEISEKIGAFETSIQPFEDCCTIFVAKHPVTKPNVRAIERSEHHLVDVIDELLKTAIETRETILCEMEVYMDNAATTRAYPEVVQLMNKIMEEDYGNPSSLHMKGVEAERYIRRAREILAGILKVEEKELIFTSGGTESNNLAIIGGALANQRAGKHLITTRIEHASVYQPMMFLEQMGFEVTWLPVNAYGLVDLDALREAIRPDTILVSMMCVNNEIGTIEPITDAAAIVKECNPNTLFHVDAIQGFGKVVLHPKRIGIDMLSVSGHKIHGPKGTGFLWVRDRVKVQPLMLGGGHQKGMRSGTENVPGVAGMAKAAEIEYTDFENKLEYLYGIRSYFIEEIEKLEGTVVNGGRSRGSLNRPAEDQQDACAAPHVVSVSFQDIRAEVLLHALEETHVYVSSGSACSSNHPAISGTLKAIGVEKRYLDATVRFSFSFDTTKEEIDECVAQLSRLLPMLRRYTPGGRKKGGKRVMPRFFVGTDQISDKDIVITGTDVNHIRNVLRMTPGEEVTVSDGQGMDYFCRIAELTKEEVRLDIVDSWHSFVELPAKIYLFQGLPKADKMELIIQKAVELGVYEIVPVATKRAVVKLDPKKEEKKRLRWQSIAESAAKQAGRALIPQIATCISFEKALRMCNGLDAALIPYEKAEGMQHARDQVRALHGKHSIGIFIGPEGGFEESEIEAARAAGAIPITLGHRILRTETAGLTMLSILMFELEEDMKWNKYRMKTTTEAVDLISYTLGEMGIEGIEIEDKIPLSDEDKKKMFIDILPDLGEDDGVAYVSFYIEPEKDHAETLQEVTEAVKELADFVDIGDATIEKSETADVDWMNNWKKFWKPFKVDDKIIIKPTWEKLPEDTTEDTLVVELDPGTAFGTGMHHTTRLCITQMKKYLKEGQKLFDVGCGSGILSIIGLMLGAGEAMATDVDPNAVSAAIENARVNHINMNQYDVKAGDIITDVDFRHACGDEKYDLVLANILADVIIPLSGVIKDNMKPGALFVSSGIINTKEDDVREALLANGFEILEVTHSGDWVAFTARKMADKRDYYEVLGVDKNASDAELKKAYRKLAKKYHPDTNPGDKEAEAKFKEASEAYAVLSDADKRRQYDQFGHAAFEQGGGAGGFGGFDFGGDMGDIFGDIFGDLFGGGSRSRRAYNGPMQGANVKINMRISFMEAVFGVEKNIEIGYKEECETCHGTGAKPGTQPQTCPKCNGSGQVVYTQQSLFGQVRNVQTCPECGGAGKVVKEKCPKCAGQGFKKIRKPLKVTIPAGVDNGISVRVAGFGEPGKNGGPRGDLLVGLQVDSHPIFQRQDYDIFSTVPISFADAALGGDIKIQTLDGEITQTIRPGTQTDTRIRLKGKGVPSRRNKNLRGDHYVTLIVQVPEKLNNEQKELLRKFDDAMKGIYKPEENEGKKKKSFKEKVEEKLKETFEDMSKIIGIDLGTTNSCVAVMEGGKPVVIANTEGARTTPSVVAFTKTGERLVGEPAKRQAVTNADHTISSIKRHMGSDYRVTIDDKKYSPQEISAMILQKLKADAESYLGEKVSEAVITVPAYFNDAQRQATKDAGKIAGLDVKRIINEPTAAALAYGLDNENEQKIMVYDLGGGTFDVSIIEIGDGVIEVLATNGDTRLGGDDFDNKITQYMLSEFKRTEGVDLSGDKMAMQRLREAAEKAKKELSSATTTNINLPFITATAEGPKHFDMNLTRAKFDELTHDLVERTVIPVQNALKDAGLEMNEISKVLLVGGSTRIPAVQDKVRQLTGKEPNKSLNPDECVAIGASIQGGKLAGDAGAGDILLLDVTPLTLSIETMGGIATHLIERNTTIPTRKSQIFSTAADNQSAVDINVVQGERQFAKDNKSLGRFQLDGIAPARRGVPQIEVTFDIDANGIVNVFAKDLGTGREQHITITAGSNLSDAEIDKAVKEAAEYEAQDKKRKEGIDVRNDADAMVFQTENALKEVGDKISADDKAKVQAEIDSLKAAIEKTNIESMTDDEIDELKAGKERLMNVAQPVFTKMYEAQNPNAGAGPQAGPQGDAGQQNYQNNNDDVVDGDYTEVMAENQNKEKDLEQPVEEQEETTEAAAEEKETSETPEAEEKESAEEAPEKKSKFFKKDKKDKKDAEIEELKDRLVRQMAEFDNYRKRTDKEKKQNYEIGASDFILKILPVVDNFERGLGAMTDADKQSSFAQGIEMIYKQLTKVLEDEGVTVIEAQGKEFDPMLHNAVMQQPSEEYESGIVIQELQKGYKYKDKVLRHSMVMVAEMELDERKIKILNAIIQTYLETGEPVGSRTISRFTDLKLSSATIRNEMSDLEEMGYILQPHTSAGRIPSDKGYRFYVDNLMKVKSEEVVRQNEMMVQKVDKLEQVLKQVVKLLATNTNYASLITAPQSQKNKLKFIQLTRVNEEQILAVMMLEGNIIKNKILTVDELVEEEEVVKLNLLLNTYLQGLSLQEINMELLQTMKRQAQGHRKIIGDLIDTIVEAIQEEDDTEIYTSGTTNLLKYPELADREKAGQLLYTLEEKQGLNELITAGENDENKHGIQVYIGSESPVQSMKDCSIVTATYELEEGVQGTIGIIGPKRMDYKKVVNNLETVMTQLDTIFKKDKKEMRSILEVSSEQLQELYEKNKKIIIFPLTKGDYGDIFVYRRCMADKNKRPLGLYLHFPFCVRKCRYCDFLSFPSDEAGREIYLERLKEEIKARGAVYQDYNIETLFIGGGTPSLMTGQQLTELLDTVRVSFHVSPVGEWTMECNPGTTDAETLRIYRNAGINRLSFGLQSMNDEELKYLGRIHTAKQFAENYQAARRVGFENINIDLMSALPGQTTASWLDTLNKAAAFEPEHLSAYSLIIEEETPFWDLYGDDRSGEADVDGIIADGVVGQQGKAAILTLPDEDSERQMYHLTKRILAEKGYERYEISNYARKGFECRHNLIYWQRKDYLGLGLGAASMVGNRRFSNVSDMTSYMHDWSYCQEEILDRKAQIEETMFLGLRCTAGVSDRMFTEKFGQSMMDIYGDIIRKYISEGFLVFHPSEGRLAFSEAGTDVSNWILSDFLLMHIDQSKIRNFCIIAHIDHGKSTLADRIIEKTGTLTSREMQAQVLDNMELERERGITIKSQAVRIVYKAKDGEEYIYNLIDTPGHVDFNYEVSRSLAACDGAILVVDAAQGVEAQTLANVYLALDHDLDVMPVINKIDLPSADPDRVVSEIEDVIGIEAEDAPRISAKNGLNIEDVLEQIIVKIPAPTGDENAPLKALIFDSVYDPYKGVIVFFRVREGRIAKGTKVRMMATGAEFETVEVGYFGAGQYIPCDELSAGMVGYMTASIKNLKETRVGDTITDAENPCAEALPGYKKVNPMVYCGLYPADGAKYPDLRDALEKLQLNDASLYYEPETSVALGFGFRCGFLGLLHLEIIQERLEREYNLDLVTTAPSVVYRIHKTNGEMIELTNPSNMPDPSEIEYMEEPIVSAEIMVTTDFIGPIMDLCQERRGVYLGMEYIETTRALMKYELPLNEIIYDFFDALKSRSRGYASFDYELKGYERSELCKLDILVNRENVDALSFIVFEGSAYERGRKMCEKLKEEIPRQLFEIPIQAAIGSKIIARETVRAMRKDVLAKCYGGDISRKRKLLEKQKEGKKRMRQVGNVEIPQKAFMSVLKLDEKMKLKRTGLVRVGAWILTGLLAADIGLQLGGVEIGSKWEWREMGRRFSERLLKGAVNQANLAAFYYDGKQKKYRVAEYMPSPEDLEAVAEENTAVLLEDMAGENSEAVRKAQEDSERAETESEAGTEYVETLAGVPTGEIYSEKALMDYDFLLGHFYTVDPTTSANSKLINGTDLLQKDLTIDLDGAEPKILIYHTHSQEGYADSEAGNADDTVVGVGEQLKKVLEEKYHVAVCHDLSVYDMQDGKEDRNKAYSQAAVAVQNLLDEHPSIEVTIDLHRDGVPDNVHLETEINGKKTAKIMFLNGLCRNSNGDVNDFAQNPNLSDNLAFSLQLQLKAKAYFPELVRHIYLRAYRYNLHFKPRSLLVEVGAQNNTVAEAKNAMEPLADILYAVLSGKMDFVNENMHSDLVIEYAERFYNSSEHDGQQLPGVEIEETVDPDYQIKVIDVKIVDAEGEKVIGKPMGRYITVEAVHLPDGNDDYQQAVTGVLCRQLQKLLPDLKDKKILVAGIGNREITPDALGPLVVEHLFITRHLFEKYGRDSVVVKDMGNVCAVIPGVMSQTGMETAEILHGLVREVHPDLLIAVDALAARSIRRLVTTIQLTDTGIRPGAGIGNKRYELSERNLRIPVIAVGMPTVIDAATIVADTMESLIGVLHQNEMLKKAVKVTEQFNHEENYLLMRELMEPQMSNLFVTPKDIDEAVGRISYTISEAFNSLCHRLMANIKSAKKRVLVNQTKALRNKMIKSGVKTAVKKVDAAIAAGDKEAAKAALLSATSVIDKATSKGVYHKNTSSRKIGRMTVAVNKMNMKTLNEHLKTKTFKNVYLLYGDEAYLRNQYRDKLKKAMINEGDTMNFSCFEGKGIDEKELTAMADTVPFFSDYRLIIVENSGFFKTSGHETLAEYMKHIPETTCIVFVESEVDKRSKLFKAVSSTGYAANLTMPGDKQLMLWLGGIVKRENKLIQEQTMQYFLQLVEHDMNGMRQEMEKLICYVGHRQVIEKADVDAVCCVFVENKVFDMISAVAEKNQKRAMQLYDDLVALKEPPMRILYLMIKQFNTLYEVRDLAVKGYPASAIAEKTAIRDFIVKRNISLGRHFEITALREAVAYGTELEEEIKTGRITDRLAVELMIQKYSRAMSRPLMWVGVAYTLGVIWASGDQKLFYGTAGIVLFVWITGRIRQPWKEKRLFWLLPVFFVSGFVIFDHAMTDVKDASMENQFIHTRGMICQSEAKEKTLAVTLSDADINGRKKKLLLYMEKDAPVAVGDDIEVRGILEKPERASNPGQFDGASYYRSKGIAYIMRPDGYTIVGKGNSYPALLDKIKKFWCGRYQSFLNEEDAGVVRAVLTGDKAEMDEKTEQLYIQAGIVHVLAISGLHISIIGMSVYTLLKRLGVGLKGSACLSGFIVLSYGVMTGFGPSTERAVIMFLVRMGAVYLGCTYDFLSALSFSALILFVSRPLSILQTGVWFSFAAVLSIGVLWPAIEKCIPWQYAKTRNYKIEHLKKSMGVKTTIREWIERMIRYIGPSAAVTIGTLPLTAFCYGAVPLVGFFLNLLVLPLMNLFVPMALGAGGVSLLSISMAGFCGGTLHFILQINRFLCEKMLIMPFSVWRTGVPPSAWLLIDYGLMIGFALLALPEHKWFKHTDIGKILIKKSWLLMLAGLFILIPIRKMYPMVAFIDVGQGDGIFMRTANGTTWLIDGGSSDVQNVGKYRIIPFMNYYGEKSIDYACVSHGDQDHISGVRELLLEKKIRHLVLTAVSETDETVRELADLAVSNGAQVIYINEDTRWESGGWQFWCLYPGREAKEKSENDQSMVLRVNAFGTTFLFTGDISSDVENVLNKDGISDVDVLKTAHHGSGYSSSEEFLKASKAKMAVISCGRKNRYGHPAPETLERMQKADMQVYITMKTGAVIMPCKKGKFLLQTWLKMRRSWRCMAALLLMIMILVSGGCQNIRHLSVSQSEKDDADTGTGYNIYYINNDETKIKAFAYQLSSTTEDGIISECMEALAVSPDDKNYKAVIASSVKVQQYQYDKDSRTLTLYFSQEYEQLSRTSEMLVRTAIVKTMTQFGGIIDYVSFNVDGSWLTDSNGNTLRMKNSDYVSEVSGSQGHVKEARFCLYFAAKDGSGLVRIYQTIHYPETESMAEVVVRTLMQGYPSDKYKPVVSQDTLLKSVSVNDGLCQLDFSKEFLNKIDGQDFRLNVYGIVNSLTELSDIQRVRITVDGKLIEEEPDGVVLMNEMTAKPDLVVQMHVKLLFAMIALAIIPIIFLQSFYINYMMNHIRANRVDLVRNYGAQIAEEMLQTDYLEGGDSDVIDGEIRQFSGLYDGRIIVTNADFDVRMDTYGMLSGKKLVSEAVVQALQNNEQSYYDKASDEIWLTYVIRDDNEDDKSEIRGMILFYMSCKDLTDTYDTITQAITFVVIGIGLVLVFMSLVMARSFTKPFKDMANSINRISDGFFDEEVNLTGFSEVEQISEAFNTMLHRLQELESSRQEFVSNVSHELKTPLTSMKVLADSLNMQTDAPVELYREFMQDIGEEIDRENIIINDLLSLVKMDKTEADLNIASVAINDLLESILKRLKPIASKRNIELVLESYRPVTAECDEVKLTLALSNLVENAIKYNVAGGWVQVTLDADHKFFYVTVDDSGIGIPEEYQDKIFERFYRVDKARSRETGGTGLGLSITKNIIQMHHGAIKVASKEDEGTTFSVRIPLTYIKQMTNKVLVVDDEKLIVKGIKFSLEQDGMEVTAAYDGKEAYELAMQNDYDIILLDVMLPELNGFEVCQMIREKSDVPIIMLTAKGDDMDKILGLEYGADDYVTKPFNILEIKARIKAIIRRTKGRKQEQPAERTIVSGEMRIDLDSRRVFIGDREVNLTAKEFDLLELLITNPNKVFNRENLLNLVWGYDYPGDVRTVDVHVRRLREKIEASPSEPKYIHTKWGVGYFFQKMERLKNLKMLLTILFIAAAGSLFLYDGKRTSDIQWQTAEETASETECLDMTPEENTDKAETESACAEPEMIYVYICGHVRQPDVYSLAAGTRLYEAIEAAGGAADDADLQQLNLADQLTDGQRIYVPAEGETAADPEYTEDEVSNGLVNINTATAEQLQTLPGIGQAKANAIVAYRENNGNFSSIEDLRKVPGIKEGVFGQVQSLICVNMVGWIVALISGVLMSIQGVLNTEVTKQTSLWVSTGWVQLSALIVCITAWLIRDRSSVTALMDVSPKYMLLGGVIGAFITLTVIVSMDQLGPARAAQLIVVSQIAAAYLIELFGLFGVDKANFQWSKVLGLGLSIIGIMIVKWKMLANTDAEDREILRKEAVRLREKYYGHDVYIRGLIEFTNYCRNNCYYCGIRRDNRYLERYRLTKEEILSCCESGYRLGYRTFVLQGGEDPWFNDDRMEDIVHSIRTDYPDCAITLSVGERSRESYQRLKEAGADRYLLRHETANEAHYRKLHPEEMSLANRKECLYTLKELGYQVGAGFMVGAPGQTFECLAEDLIFLHDLQPEMIGIGPFLPHHETPFAHEEKGSYDLTIYLLSVLRVMFPNVLLPATTALGTIKATGREQGMLAGCNVVMPNLSPVANRKQYELYDNKICTGDEAAECRGCMENRMASVGYHLVVDRGDFKHAMSLLTSAVSMTKAMVQIDSTDPGTYEKAMADWIEQQLSDLSNVLITRENVLPGRPNLMAEIPGPKHLPALVMICHMDTVVIGDGWTLPPFEAIEKDGKIYGRGACDMKSGLACCLSAFIMAARTLHASGQAPKRTLKLICSMDEEDFMRGSEACIGSGWVTSKDWVIDAEPTNGQIQMAHKGRTWYEIDVEGHTAHASTPWKGADAIAAMAEIISALRQDILNAPSHPDMGISTVTFGQITGGYRPYVVPDQCKLWIDMRLVPPLNTAKTTEFVQNAIHLAEEKVPGVKATYTITGDRPPIEMNPDSPLLTELKKACHHVTGHQPEVSCFTGYTDTAVIAGQLDNQNCMSYGPGCLEAAHQPDEWVVIDDIIRCEKVYHQLISSNILMKRYKIVRIDEADYGCEGRPDGEEAMDSVWLEDENGERQIVRASDRMLYDRHLDEGSLVTFDEKHQLTAWFAKMKDYIEERAVELAYYIIETKSTVRQTARCFGISKSTVHKDITERLEEINPSLASETRKVLDVNKAERHIRGGLATKEKYLHQQISMKLISWNVNGLRAVVGKGFVDIFNELDADIFCLQETKLQAGQIELDFPGYEQYWNYAERKGYSGTAVFTRIKPLSVRYGMDIAEHDTEGRVITLEYDSFYLVNVYTPNSKDGLARLPYRMKWEDDFRNYLKTLEQTKPVVMCGDLNVAHEEIDLKNPKTNRKNAGFSDEERAKMTELLAAGFIDTFRYFYPDKTGEYSWWSYRFNARKNNAGWRIDYFIVSDALKERLISASIHQEIFGSDHCPVELELKEMSTEKKIKKLKMIGISMIVGILIGVLIGILIYKKVDNVMNKKEVTLDYLTGKLENIGEFATQEVTYTSRVQIEKGSIPFITQKGFTMEYNATLKAGVEIENLKIDKKGDKYIISLPHADFLDTAHIDPNSIKFIDEKKAVLNWNNKDDVAEAIAKAEKDVMENPTVDKEMLFERADENVERLIHVFLDDLVGEDNIEIDFKMVKSSINQEDIMKLLDSCYEKCLNGVPMVSQSVESMAQDYLTKYGSKEKACKAMLKNQITKCTTSGVVTGFGGIITLPVSIPANVGSVLYVQMRMIACTAYMASYDLNSDQTQTFVYACLAGVTVNNILKQAGIQFGVKFANGVIKKIPGKVLTKINQKVGFRFVTKFGTKGIVNLGKMVPGVGAIVGGGLDLVETKIIADRAYQWFMMGDFADVTENEETVVDIDDSNFECEETEDKMSQYTEFYDREAETLSLDDDRFEERLLEIASHFRGFDEALTAFIETHGYTGDSTDVLAKAQFLQKKFKSANIKLPRDFKEWFVPNKKVSRKTAFQICFALGLDVDETNDFFRCVQFERSFDCHTISEAVYYFCMKNGLSYTEAQEIIDHIPVPQKVKTIPNCEILYTRTIIEYINGIDDKERLIQYIIDNINDFQYNNVTAIKYIQELWSEISKTDGLAAQEGTIIDRTYNRFEDRHRKGMTDTRATEIIAEEICQQEQEVKPYDYVVAGSDASTWIIFSQIIGLANYQESEYSIKHDRSLSSVLSENKLMPLKADYCFPSRQNIDKLIRGNLVGDDEIIRKMLIFLVFYSHWAKLIINQNDAFYSAKFSDAERCLYTINKRLLDAGYPELYAGNPYDWLFKWALNDENPLIAFRHYMGEVFAVKGENTEDMDHRIALKSNTPLRLCNSRGEAIHCIIESEIGRGGSCIVYEAARITDTGDKTLYRVKEFYPYKLNISRDENNCLIPSANDASVFAQRQEQFHSDFSRTNQLFYSDTNYSSMANQLDIFRQNGTSYVLSAYSSKETLATYKPENLKECITLVKQVAYVLDNIHKLGYLYLDTKPDNVLVVDGYQKQIQLFDFDSLLSIQEVRKISKLSCSNIRLSYSKGFSPIELQTSKIKHLGAHTDVYSVGALLFYLLFGYTPTAPDCETDTVFDFTKIQYDYHKCDDRLFGSLSEFFHNALAIYYADRYQSMPEVSEQLRKIEKYADFVIPRIYSTQIEKPKIFYGREREFEELDSLLANPDYNCLFVTGMGGIGKSTFIREYLTCRREKFDTVLYVHYKGSIEATISNDSNIEINTLRQDEEPGIGTRYFNKKLQKIRELVRGTSSVLVIDNFTGEFDDDLRELLKTELKVILLSRKTPFYQSCQELRLSAVSDSNALRCIFEDNLGRSIEENERDSFMQILKHVMGHTLVLELIAKQIANSHITISNAASLIDEHGFFAIAPEKVVYEKDSKQTSDTIGNIIDALFEANMLSAEKKVLMKVSSLLGDDGIDINYFQQIMQLVSKDDLNELIKDGWLTISGDTISMHNVIQESVHRWEWKPEYVNAAEQFLTYFYVEIRLESTKNNYPKKLRKYITAVDAELPPELKDKWIFKKLIAYRNHRKNEIDKRLEKKSDKQKLVGKVYRERYARIKDESPADIKKLTKLLFQAENILKQCQREAALCDTDLFLNLQLTVLLNMPRYREDFIFSEKNRLFANNAKILDFGEYANSMRNISQDAVSLMLIYKLVFSIYAAHGNKEAMKDWLESANKAARHFRKQEVYAIYYNMVSDYYDILLDGSYDTEDPNEERLLNKMLDAIEKTLHYSKRGLSHDVNHLYAKNILAKATILMRSGRGTEKEISTLINTAKKIITENTSQYADVRLQYYLVCAWYFALVHDSAMSTDVFVKNARELSDIIIPTDLQKIEEVIIPCANIFFELSCHDKAMALLYEGTRLCAKHANTDSYAHIRQELCNHLFEVGIEAHQFNLCQKAIELIEAENKEIVDPKNRVVIPAEVRSIISSKTTMNTNRISQIIESLNGLGTKQKVHSGKLDVCKFMAKFKVLFYGEYEDEVFNTKEDAEEYALYLCSCAREGAEILHMSNPGDYDYDEDNFEDPDYEIVKIDMNMNKKVKIFIILAVILSMVVCFAGCGNIETPNNLNSNTTKEKINIEDISWNVNEGIVDGDHYVLLNYTNNTQYTITNFKLTFTEKTGITEEEKVKFYSDIQEKFEASDKDMESIKSQPISMHAETGRVVNPSETASNINCYYYSGSFYLKDINYYNLVEPDIATIKYIDEDKIFTVYYDYGSKKYSAESETEVAYQWSQTDLGSKIPKPDVKVVESDRDDEIIFMFNAYGLSLDQFNAYVEECKVLGYTVDPGNFEGFYSADNTEGYNVYLYYNKKDDSMNGAIRAPETKSEMYSDKAFLKIFIEMGEALLLSGAEIFRVEDTLNRMGRACGAVDMNVFVITSSIVITMEFPDGGVLTRTKRIRSAGGNDFVRLGQLNDISREFCKQPFSAQELEMRIRKVCQTPSLKWQQLAGNVIAGVSFAIFYGGSLADGAGAAVAAVWLWLLQQYVMPYCMNQVTFQFVASFLMGCVICALSRICPVLSMSRMMIGDIMLLVPGLMATNAIRDILIGDTISGFMRFIEAVLLAAVLALGIIASICLFRLFMPIGIIINASCIAVGGIIGLFAQNLISKRFKDSLNMIFGLCSMGMGISSIVLMENMPAVIFALILGTGIGLAIHLGDKIRAGALMMEKASSRIVKSSPSALDRKEFTETLITIIVIFVASGTGIYGSIVSGMTGDHSIMIAKSILDLFTAIIFSCTLGSVVSLIAIPQFILFMTLFLLAGVIYPLTTPAMINDFKAVGGFFMLAAGFRMNKVTNFPTADMIPAMILIMPFSWIWSSFILPLVSMIYFIVNITARTGKSRAIWMEMKEILENRSIEYKAFQTRYAGHATDLARKISSLPEDRIYLITVGGDGTLNEVINGITDFSRIVLGILPIGSGNDFARGMGISKDTLSNLEQMLDLIESASEGTAIDLGEVSCEALDTPKYFAISSGAGLDAIVCKKALHSRLKKFLNQLHLGKLTYLLLTIESLFSMTTCDADIIFNHGEAMHVSHMIFSAGMNLRVEGGGVPMAPDAVPDDGMLCLAMAHDVPKWLTFFLLPFLVAGKQKYISVFDCIPFKECTLHLSSPLTVHADGEYCGENTTITYKCLPGKLHFLKISMNNHITIQRQLLCCLFRENRSMNRENFQSRLGFILVSAGCAIGIGNVWRFPYVAGQNGGGVFVLFYLIFLLCMGVPVLTMELAVGRAGKKSAVQAYKALEKDGQKWHIHGWFCMIGCVLLMMYYTTVSGWMLSYFVKFITGSFKSGMDADAVGGAFSNLLANPVEMAVFMAITVVAGFIVCSFGLQNGLERISKIMMSALLVLIIVLAVHSLVLPGSGEGLRFYLLPDFKRAADVGIGKVITEAMNQAFFTLSLGIGAMEIFGSYMPNGRTLTGESVRICGLDTFVALMSGLIIFPACFSFGIQPDAGPSLIFVTLPNVFVNMAGGRLWGTLFFLFMTFASFSTVIAVFENLIAGCIDNFGWSRKKAVLFNGILILIASLPCVFGYNIWSDLHLIGGRDVLDTEDFLVSNILLPGGSLVYLLFCVSRRGWGFDNYLEEVNRGKGMKMSGKLKWYFMTLLPILILIILIQGLIMSDYKMNTKCVQSGYRPGNGEPRQIPIVQSTTFKYDTSEDMGKLFDLEASGYFYTRLQNPTNDYVAAKIADMEGGTAAMLTSSGQAANFFALFNICQAGDHIVSSSSIYGGTFNLISVTMAKMGIEATFVSPDCTEEELNAAFKENTKAVFGETIANPALTVLDIEKFAKAAHAHHVPLIVDNTFPTPVNCRPIEWGADIVTHSTTKYMDGHGAAVGGAIVDSGNFDWMANAEKFPGLCTPDDSYHGITYAEKFGKEGAFITKCTAQLMRDLGCIQSPQHAFILNLGLESLHVRMPRHVENGQAVAEFLEKQPQVAYVNYPGLESDKYHERAMKYMPKGGCGVVSFELKGGRKAAETFMKHLKLAAIETHVADARTCCLNPATSTHRQMSDEQLAAAGVPAGLVRISCGLEDKEDLIADLAQALAQIEEMELKSALEQLGLLQKKLYAYQTASSSLYLDSVTVAPKDTSEGRGVALGILAGESQKLMTAPETGELLAFLADQKENLSFVEQRQVEELKRSYDRLSRIPADEYMDYAMLTNEASDVWHRAKESSDFTLFAPVLEKLVAYNRKFAGYYDSSKKPYDALLDEYERGVDMAFLDTFFETVRERLVPLIHAIGEKPQIDDSFLHLHYPVDIQRKFSDYLMEVMELDRGHCTIGETEHPFTLEFNNKDVRITTNYKEDNVVDSMYSVIHEGGHAKYELGIRDDLQYTCLTGGVSMGVHESQSRFYENIIGRSLPFVKAIFPKMQEFFPEQLKHVTAEQMYRAVNKVQPSLIRTEADELTYSLHVMVRYEIEKQLIDGSLEVKDIPEVWNRLYKEYLGVDVPDDRRGCLQDSHWSGGSFGYFPSYALGSAYGAQMLCNMEKDFPVWDEVRAGKLTGVSAWLKEKVHQYGSLLTPGEIVKNACGDFDPTVYTDYLTEKYNKLYDLMSQFYYLNDEILGSCHLAVGERNTVLFDPGMAWYGEKTVEKIKEIIGDRPIDAVFLTHSHYDHVGALPVIKKYWPDAMVFGAAYAGRVFSKLSAKRLIRELSASAAQLNGTALPDDYSTRAIQLDQMLIGGETINVGDVCVQSIKTVGHTKDCLSYLIDGHDLLASETIGSINTEDDYMPQFLVSCEEAMKSIDSCRNSGAKKLWLTHHGEVGEATPELWQWFEDGLTAAKSRILEIIRDNETPEEQLKAMEAVFWRPEKKGGWPQKAFDLNAESMLKTIKSENFLSHSKFTKMDRITKIIQETHHRFLNLFCMNVRHRNGEASEYYVASRAKSEDDLKAVTHRNDPDGVSIYSVYGEQRDQVVLVKQYRYPLGDYVYEFPAGLVETGEAMTDAAVREFHEETGLHLKVIPADDMYTKPRFTTVGMTDEACGMVYGYASGVPDNRFEESSEDIQVVLADKKEVRRILKEENVAMMCAYMLLYFLKSEGDPLGFVEMQEKRMNKKPSRPQVNPSTLKRLLGYLSVYKTRVIVVVICILLSAIANVMSSLFIQRLIDDYISPLLLEANPVFDALFRAIVQMACIYVIGILASLIYNRTMAVISQGILKKIRDDMFAHMQTLPIKYFDTHTHGDVMSHYTNDTDALRQMLSQSLPQLLSSCVTIVAVFVSMLYLSVWMTLFIVVFLFLILKVVKSIAGKSSVYFIKQQQNIGDVNGYIEEMINGQKVVKVFCHEEEAKAVFDKKNQELCDSMTTANTYANILMPIMGNMGNILYVLLAIVGGSLAIAGVTNISLTGAGAMTLGTIASFLTMSKSFINPIAQVSQQLNAVIMALAGATRIFELLDEEPEEDHGYVTLVNAKRENGELVECKERTGLWAWKHPHSDGTLTYEELKGDVVMEHVDFGYEENKLVLHDINLYAEPGQKVAFVGATGAGKTTITNLINRFYDIADGKIRYDGINITKIKKDDLRRSMGVVLQDVNLFTGTVMDNIRYGKLDATDEECIAAAKLANADGFIRMLPNGYQTVLEGDGSGLSQGQRQLISIARAAVADPPVMILDEATSSIDTRTEAIVQKGMDALMHGRTVFVIAHRLSTVKNSDVIMVLEHGRIIERGNHEKLIAEKGKYYQLYTGAFELEMSFFLNNKKADKPVLNHVNLNIRSGQTIGVIGGTGSSKSSLVQLIPRLYDVTEGRVLVGDVDVRDYDIESLRNEVAMVLQKNVLFSGTIKENLRWGDKNATDEDIQRVCRLACADEFVQTFPDGYDTYIEQGGTNVSGGQKQRLCIARALLKKPKILILDDSTSAVDTKTDAAIRKAFAEEIPDTTKIIIAQRVASVEDADQIIVLDEGEIKAIGRHEELMQSSDIYREVYESQKKGGDDNEMIKTLAGSIRQYKKQTIMSPVTVALEVFFEIMIPLIMAKLIDEGIDQGDMGVIWKYGLILLAVAMISLFCGAISGKFAAQASSGFAKNLRQDIYYKVQEFSFANIDKFSIASLVTRMTTDITNIQMAFQMIIRIAVRSPIMLVCALFAAFKIDAHLSLIYVITVPILGIGLYAIIMKVHPIFERVFKTYDRLNAIVQENLYGIRVVKSFTREDHEVGKFDQVSDNIYRNFVKAEQILAFNMPLMQLAVYTCMLLICWLGARAIVACGGDEALGLSTGEFMSLFTYTMQILMSLMMLSMVFVMIIMARASAERICEVLSEESTLKNPEHPVYEVKNGDIQFDNVVFSMCRKDLPCREELGLLILRTATMIRRKADSNVYMSKVHKITGSNGWILGYLADHENEEIYQKDIEEKFCVTRSTVSKVLKGMESKGLLRRESVSSDARLKRLVLTEEGREINANAAVERIELENRIRDGLSDEEFHTLMHLLKRVADNMLEEMLEVINASKTFAKGTPNEHKALDHLNLSLKEGEFVTILGSNGAGKSTLFNAICGNFLLDEGSVILDGKNISYLPEHQRSASIGRLFQDPMKGTAPNLTIEENLALAYSKNTKGLFRFAITKKDREMFCEALKRFDMGLEDRMATKIGLLSGGQRQVVTLLMSTIVTPKLLLLDEHTAALDPATAEKVMAITNDIVHERNLTTLMITHNMGQALTTGSRTIMLDSGAIIFDIKEEERKHMTVSDLLDMYSEKKKEEFDNDRILLNMTLLIGSLQLGFLYSIMVLGIYISFRILNIPDLTTEGSFTFGLAASSILTAAGHPLLGLVGALIAGALAGSVTGFLQTKLDIHPVLAGILTMSGLYSINLFVMGGASNVTLLNNDTVFTLFLKVFPFMSKDAVKLFVAIAAVVIVTVLLTVFFKTSLGLSIRATGDNVDMVRASSINVDAVKMIALAISNACIAFCGGLIAQYQSFADINSGVGILVVGLASVIIGEAFFGHRSLMIGFISAIVGSIVYRYIIALATKSDMFPAYMLKLISAIIVTVALAVPAIKTKMANDKLKRQGMRESDGGRMKKLLSAVCILAMTAMTLAGCGSSSTQETKAATTEAAVSEAASEASEALDSEGAKADGSYTVGIIQLIENGAFNDMREGFIEELQAKGYTEDKLTVDYKCAQGDATNLQTIAQSMADGDYDLVCTIATPATQAMVNLETDTPVVFIAVSAPVAAGVITDMDHPDKNATGTSNAIPVSDIFALSNQLTPDCKTFGFLYCTSEVNSVNTIEAAKEYCDANGLSYKEATVTNSSEVQQAAQSLVGSVDAIFVPNDSVIQASMTLVTEVARDAKIPVYGSSATMVDSGAFATVAISDKGIGAMSADMAVQILEGTAVADIPAVVVPASATVINNQTLEALGITLSEDVQSTATFVDDAKMENNQEIIRLENVSKTFDLRYHKTLRAVDNVSLSLHKGICTAIVGESGCGKSTLARMVTLLEPVTDGMIYYKNEPIGGMQNGRNIALRGEKLREYRRNVQMIFQDPANVFSPRMKIGTFLMEPWIHFEKKSKKEAREMAYYSLKRVYLGEEYFDKYPHQLSGGELQRIAIARAIALHPEVLICDEATSALDVSIQQEIMALLKEHQDETNYAILFISHDLALVENFSQQVVVMYLGRIVEIMNGAAFRMHARHPYTKALLGSVFSIYDDPDKDIYVLEGEAQSPTGEIKGCVFCNRCSQAKDICRQEAPVLKSIRTGHQVACHFAMNVLELMDVSIIYQNTKEAVKHVNFAVPEGKIVAIVGESGSGKSTLIRAAIGLLPAGGELASGQILFGEKDMAAMTAEELRHVRGEGMAMIFQNAGDYLNPRRKVCDQYVETLRCHQSMTKKQGYEIAKKMLATLKLPDTKHVMNAYPFQLSGGMKQRVAIAMAMSMHPKLLLADEPTSALDVTVQAQVVKQMMDLRDKMGTAIVIVTHNMGVASKMADYIAVMQNGELKEFGTREQVIYHPENDYTKKLLTVVPKLQGETDGEMKKGKLSKIAAIAMAFTMACGILSGCGGSQSAKTADSAANQTTESAEGQTKGTQEAEDGKHINVAFFWIASDLDPANNYNGWVLSRLGVGESLVKLNDELKVEACLADSWENVDETTWKFHIREGVMFSNGKAVDAEAVKASIERAISMNDRAAEYLKVDSMEADGQDLTIKTTEANAALLNNLVEPVFDIIDTTESEETIQTAPVCTGPYVVSGFTPEQTVTLAANPTYWDGTAGLDSITVKQIADADARAMAIQSGEIDLTNTIDNTSVTLFTDNEAYNVSSIISPRVNVAYMNQAETSPLHDLELRKAVSYAVNRDAYADLIGGSAAHSAYSDSTPFGNDTITAYTYDEAKAAEILDNAGYKDVNNDGYREMPDGSELVLNYLQAADHGSADSAILATAVQSDLKNVGIHMEILSVENLSDYQTQGNFDLYTANDNSAPTGDPQIWLETMYTGLGTSGKKNLTGFQDDKIDEIVRKMSETFKTEDRYALAAEASQVLNDDAANLFLTNSYLNMVSASKVKNANQPVADYYVITKDITVEMSEATKIRLRERKSQPRKSWFRPAKTEKGKWLRFYCCLAAVALVLFIAFFGKYFAPYDPLATDYAAKLSAPGGSHLFGTDNVGRDVLSRILYGAGNSFILTFIMIAIVSVLGTVIGIVSGFFGGLLDTVIMRLTDILLAFPDTVFAIAIVGMMGPGLLNTVIALSFVWWTKYARMARGLASVIRTKDYITEARFGGVGTAGILFRYVLPNIVPQVVIMATLDVGGMMLALAGLSFLGLASQPPTPEWGYMLYDGKSYLQTAPWIMLFAGLAIFITVIVFNLLGDSLRDILDPKENMVKYILKRLVQLVVVLLGVTFLTFMITQAAPSDAAEMKYVSMGMMPSSELLEKTREEMGLNDPVLIQYGRWLGNVLHGDLGESSKFGESVWTQMTRKLPMTLKLAGVSLVAVILISFPLGVLSAVKKKKTADYIIRFLSFFGVSMPNFWLALLLMYIFAVRLGWFKVVSTDSIGGMILPVATLTIPMISSYARQIRAALLEELNANYVIGARARGIPERRIIWGHVLPNAILPIITLLGLSVGHLLGGAAIIETIFSWQGIGNMVVEAIRVRDYPLIQGYVIWMAIIYVTVNLIVDISYRCLDPQIRLRKRVDMEQLETIRSYWNTRADGYSKSVMEEMEDAQKEGTYWKTLLDKYLPKADNPKVLDLGCGPGFFTMMLGQRGCQMTAFDYSDGMLNQAKQNAASAGVTAEFVQGDAQKLPFEDETFDMIVTRNLTWNLEHPEKAYREWLRVLKKGGCILNYDGNYYLHYYDEEYRQEYEIRQIHHGDEHKYIENVDVNIINNVARDLPLSREKRPQWDINLLLEMGVKGLETEVDRSRFEDEHGKDHQVIDHFMIYAVKMTKVPLHDMIFLLKLPVRSGQMIFLQMRRNEMAEGYPDGITIECTKHSLFSLFETGMLFFLLFAGKQNGEKTYGTAMATDNNGFRIVGPKQISAPVLSEQTKRRLPSVSFAILGMIVLGCLLANVIATKDPSYMDLMNYTKAPNREFLFGTDNLGRDIFSCIWYGGRISLSVGVIATVISTVLAILYGSVSGLASDMVDTIMMRGAEIVLTIPSILLVIFIQAVLGEPTTLSIAFVIGITSWCSIAKVVRTEVRQLRKSEYIVASKCMGGSFFHILIRHLGPNFISAIMFMVVMNMRSAIVTESTLSFMGMGLPLEVISWGSLLSLSDKALMTKAWWIIMIPGLFLIVVLFCLTNIGNWLRTSVSQKESNLMNKVVYYLKKLLIFLVSILALSILVFFISRMTPTDPLQSYYGERTEKMSVEEKDRARERLGLNDPIVIQYGKWVQNAFRGEFGISFKYKQDVKIVIEKRIGNTLMLGGIGFILTFVGAILLGVLCATHENSLLDRAISTIGTITSCIPEFWFSLLLIFMFSVIWHVLPSSGAYSVGKEGDLLDRIRHLIMPMIVVIFEHLWYYAYMVRNKLLEEVRSDYVSLFKSVGINRRRIVFGHCLKNIMPTIVSIMAISVPHIIGGTYIVESVFSYPGIGMLSYESARYGDYNMLMVLCMMTGIVIIFCNILGQIINEKIDPRIKANEITERSEVSYGDGQMSENILEVSHLTHYFKLNKKVSIKAVDDVSFQVRKGEILGIVGESGSGKSTLARCLMNVYEPKSGKVLFEGIDIFDKKAYRENKKFLQTQRQIIFQDSASSLNQRMKAKDIIAEPLRINHIRTARGSAEAEASFQLKYVGLDDSFLDRYPSQMSGGQRQRIAIARGLTTEPDLLIADEPVASLDVSIQAQIINLFKHLQEDHGFSIVFIAHDLSMVEFLCDRVAVMYHGRIVELADTKALYETPLHPYTKDLLSAIPVPDPILERKKVRPDYSKTVYDTEGQLKEVEKGHFVLTKGRGETVENEMELLKVENLSVEIGRQKDKVKPVRDVSFSLHKGEVLAIVGESGCGKSMLCKSVIGLLPKSGKITAGSIYVAGTDITHYTERQMEKLRGSFFSMIFQDPLTALDPTYTIGSQIAEAIRVHHKDMTKAEVNARVLELMHLVGIEEPQERKNLYPYNFSGGMRQRSVMAIALASNPKVLLADEPTTALDVTIQAQILDLLRMIQQELDTATILVSHDLGVVARVADRVAIMYAGKIVEIGTAKEIFYDPRHPYTWGLMRSLPGFSRGQNRLHTIPGMPPSLVHLPKGDAFAARNEYALGIDYEQEPPMFQITKTHYAATWLLDKRAPKIECPIKRGRNDEMKKRMGKAAALLMAVTMACGMLSGCGSNGSEKAPETAKAQTEAGAAESGEAREGGGTIVYGSNDYTRINPAMDEHGEINVLIFDGLTDHDGNNEVVPRLAKSWDYDEENSTYTFHLQEGVKWHDGEPFTAEDVKFTIEAIMDPANESENAPNYEDVESITVIDDHTIEFKLSAPNVAFLDYMTMPILPKHLLEGENMQESDFFRAPVGTGPFKLAKWDEGQQIVLEKNEDYFAGPAKIDSIIFKIVSDDNAKALQLKSGELNLAQVTPKDAVTFEGDDAYNVYTMSTSDYRGILYNFRNEYWQENADLIPAINYCIDRQAIIDAVLLGHGQIAYGPLQKNKYNCEDVEKYDFNLDKAAEAFTAAGCEKDDEGYWTRDGKRIGFTIDATPSDQVRIDMAQIAAQQLKEAGLDVRAEVPAEGIDWGGQECCIIGWGSPFDADDHTYKVFGTDKGANYNGYSNEKVDAYLKAARETTDENERMTQYALFQKELAKTPAFTFFCYIDAMYVGAKNISGIDQNMVLGHHGVGIFWNVCDWTISEMDLSKITIKKIRELIVFTALLVVALWKFDVVLDVLKAIWEILFPFVLGGAIAFVTNVPMSFLEKKIFGRVKKENKIVVKLARPISLLLTIVFAVGVIVLVMFGVIPQLTRTVGTLMGSIADFIPQMQSWIREFSHNNQEVMKLVDQVQFNPDQAIKWGISFLENGAGNMMNTTMSALGSIVSGLATFFIAFSFACYVLFQKEKLHVQIRKVIFAFLPRKKADAFLKVCSLTYRTFANFLAGQCLEAVILGCMFVVILSILRMPYALLIGILIAFTALIPIFGAFIGCAVGSFLIFMVSPEQAILFIIVFLVLQQIEGNLIYPHVVGESVGLPSIWVLAAVTIGGNLMGIVGMLVFIPLLSVFYTIFREFVYLRLKKKHIKQVTKTEIEEYTVEETRQTHEMNLNIFYGILIPFLGTSIGAACVFFMKNTLSDKIQRALTGFAAGVMVAASVWSLIIPAIEQSASMGKLSFLPAAIGFWIGILFLLLLDHIIPHLHQNSNQAEGPKSKLQRTTMMVLAVTLHNIPEGMAVGVVYAGYLSDSTTITAAGALALSLGIAIQNFPEGAIISMPLRAEGMKKSKAFVGGVLSGIVEPVGGILTILAAHYIIPALPYLLSFAAGAMLYVVVEELIPEMSQGHHSDVGTLCFAVGFSLMMILDVALGMAVSLILTEQIIKLFIILLLGFLLVKFGLLKASDSKSVSVILVYLILPCMIINAFQIDYTPQVRTGLIFTIAASVIVHLIFIAVTALLKRLLGLDTIEQMTVIYTNGGILVIPLVQAMLGDDYVIYSCSFIVVQIILLWTHCKQKLCSGQKLELKSIFLNANMVAIYVGIILFFTQIHLPDVIGGTIDMLANMVGPMGMLLAGMAISEVPLKHVFMTGRNYLVVLLRLFVYPVIILAVFKLSGAAGMIPDGKNILMIVYLACITPACATVTSMAQLYDSNAAESSMFYVLTTICSIISMPVMIFVYTMVIMMTYPELKIGDLTVKKPIIQGGMGIGISLSGLAGAVAKAGGVGVISTAQIGFREPDFEEHPAEACRRAIGKELAKARKIAPTGIIGFNIMTALRDYEGHVRAAVEAGADLIISGAGLPLDLPGLAAASQTKIAPIVSTERSAAVILKYWDRKYHRTADLVVIEGPKAGGHLGFSREQLEEYAEYDDKEYAEKSYDDEVKKIMAVVRKYGEKYGCSIPVVLAGGIYDRAAAKHAFSLGVDGIQVATRFVTTEECDADIRYKEAYIRANKEDIQIVKSPVGMPGRAIMNSFMERVMAGERISPKKCLLCMKGCKPSEIPYCITESLLHAAKGETDEALLFCGADAWRAEKIETVEKVMDDLLQAMKLGNMFKKTNQKNYITLTNRKANVQNSGESSPEVPEGLMRKCNACRAVLLAESIIGNQYICPKCGNYFSVPARRRIEMLADEESFKEWDTGLTSGNPLHYKGYEDKVEALREKTGLDEAVTTGLARIGGHEVVLAVCDSHFMMASMGKVVGEKLTRAIEKATERKVPVIIVACSGGARMQEGIHSLMQMAKTSAALKRHHDAGQLYISVLTNPTTGGVTASFAMLGDIILAEPNALIGFAGPRVIEQTIGQKLPKGFQRSEFLLEHGFIDQIVEREHLKNRLEHLLSLHEKNPEAEQRLRNYKEVSVSSENPDLNMSEELSIAKKDEKKSAWDRVLASRKKERPVGTEYIEDLFSDFTELHGDRYFGDDPAIVGGIARFHGMPVTVIAQEKGRNTRENVLRNFAMPSPEGYRKALRLMKQAEKFHRPVICFVDTPGAFCGMEAEERGQGEAIARNLFEMSGLKTPVLSIVIGEGGSGGALAMAVADEVWMLENSIYSILSPEGFASILWKDSHKAKEAAAVMRLTAADLQKHGMVERVFEEPEDLTIETLPELTLKMDRCMKIFFRKQLAMTGDEIAEMRYRRFRALMIRKVLIANRGEIAVRIIRACREMGIETVAVYSEADREALHTQLADEAICIGPAPSSESYLNMEQIISATIVSGADAIHPGFGFLSENDRFAALCEQCHIIFIGPNADVIRKLGNKSNARNTMIAAGVPVIPGSKEPLYHAEEALAIAEEVGYPVIVKAALGGGGKGMRVAYHQDELENAFMTAQKESMAAFGDNTMYLEHFVEHPKHIEFQILADSYGHVIHLGERDCSIQRNHQKLIEESPCAIMNDALRQKMGEAAVNAAKAAGYVNAGTIEFLLEKTGRFYFMEMNTRIQVEHPVTEWVTGIDLIKEQIRIADGRELSYTQEDVKLTGHAIECRINAENPYKGFRPCPGKITDMYLPGGKGIRIDSAIYSGYEVPPYYDNMLAKLIVFAKNRNEAITKMRSALGEVIIEGIDTNVDYQYEILNDPDYQNGDFDIEFIADKEEQLLNHRYAAEVMKHLGINEIKEILPHRHPFLLVDYIEDYEPGEYAVGYKCVTYREDFFAGHFPQEPVMPGVLIIEALAQVGAVAVLMQEENKGKLGYFGGIKNCRFRRKVVPGDKLKLEARIIRQKGPVVVGEAIASVDGEVAVKAELTLAIGEMELDELLKLIRAVSDSELTGFKYEAEGVCLNLKKEKEVVTAVQTLPAAGVSQSVMPMQAVAASAMSEASADSEEKAAGTKEAEQKGFLVKSPLVGTFYAAPAEDAAPYVAVGDTVKKGQTVAIVEAMKLMNDIESDFDGTVAEILVENGEMVEYGQPLFRIAMEKRRVVITGMGAVTPIGNNVETFWKNVKEGKNGIGSITKFDTTDYKVKIAAEVKDFSAKELMDFKAAKRMETFSQYAVAAAKEACADAGFNIEEEDPYRCGVIIGSGVGSLQQVEKACQTIETKGPGRVNLLLVPMMISNMAAGNVSIQLGLKGKCTNVVTACATGTNCIGDALRAIQYGDAEVMFAGGTESCICPTAVAGFTALTALTTVQDPDRASIPFDKERGGFVLGEGAGVVVLEELEHAKARGAHIYAELVGYGATGDAYHITSPAEDGSGAAKAMELAMEEADIAPSEVQYINAHGTGTHHNDLFETKAIKKAFGEDAKNLVINSTKSMIGHLLGAAGAVESIVSVKAIEEGFIHQTIGTKELGEGCDLNYAIDGPVEKDIQYAISNSLGFGGHNASLLFKKYEGQVMGKFDGKTAVVTGASRGIGRAIAKKLAACGATVIINYNGSESKAAAVQQEIIDEGGRADIFQCNVSDFAACEAFFKAVTEKYGRIDFLINNAGITKDGLLMAMKEEDFDSVIDVNLKGTFHCIRFAARQMMRQRYGRIVNMASVVGVAGNAGQANYSASKAGIIGLTKSAAKELASRGITVNAIAPGMIETDMTADLADKVKDEMMKQIPLKRFGQAEDVANAAAFLVSDEAAYITGQVLHVDGGMVMMNKIAFIYPGQGAQKAGMGKDFYAYSPLAAEIYDKASEILNIDMKALCFEENDLLDQTEYTQAAMVTTCLAMTAVLEEAGLNPDVTAGLSLGEYCAIALAGGMTTEDAIRLVRKRGILMQNTVPKGKGAMVAVIGAETELIEKCLAPIEDVSIANYNCPGQIVITGKKSAVEQAVEALKAAGVRRCVMLNVSGPFHSPMMIPAGEALDQEMADMQWSELKIPYVTNVTAEYVTDIHETRALLAKQVASSVRWQASMERMIADGVDTFVEIGPGKTLAGFMRKINRNVKVYTVNTVEDAQKVIEELRQLIIMKTEVTELLGIEYPIIQGGMAWVAEYHLAAGVSNAGGLGLIGAASAPAEWVREQIRSARKLTDRPFGVNIMLMSPYADEVAKVIVEEGVKVVTTGAGSPEKYMQMWKEAGVKVIPVVASTALARRMERCGADAVVAEGCEAGGHIGENTTMVLVPQIVDVVKIPVIAAGGIADGRGMAAAFMLGAKAVQLGTVFVTTEESQVHENYKKAIIKAKDIDSRVTGRTTGHPVRALRNQMTKKYLELEKSGAGFEELELLTLGGLRKAVVDGDVVNGSVMAGQSAAMVKEVMNCHDLIRKLVRETEECFGRKYYEMLEKVIAIVAEGLGVEAGNLNAETTFESLGADSLDLMDMVMNFEDEFGIEIDADSMGTLKTIGDVVDYLTAHQNMRGRICGTGSYLPEKYYDNNDIAKIVETSDAWIRERTGIVRRHIASGYETTVSMAVEAGRRALENGHVLPEEVDMILVSTITPNAVIPGVAFQVQAALGADRAVCFDLSAACSGFVFAYQTAQAYIAAGLYQTILLIGSETLSAINNWEDRSSCILFGDGAGAAVVQAEEGELYPSVAGSDGTMGHVLACESRVQNDWQQKEADRKTYIDMDGTAVFKFAVRKMPEMAKSLMTQMHCTEADIDWFITHQANERIIEAIAKRLKSDIAKFPMNIAECGNTSSASIPILLDEMNRSSQLKDGQKIIMAGFGAGLSWGAVYMEWHAMMIECRDNEKLLQFYKENHFSEIAKIPDDGQSMVQMIRKIYMATSTFDRKIELNTTESVKKLMEVMQEDAPVKPLSQHPFSSVERERSERLLKQFLSRMGNFVNPGNDAFRVALASSIYVDKTGLLEYTNKVTGTLQAYICNSRPRRFGKSITANMLTAYYSKGCDFETIFADLEIGKSPDFKKHLNQYDVIHLGYLAYDQDKERAFIPNEEVRMELIRAAKRRKWNELTDLDIKISMCGGLKNPTDEKYSEAFFDSITSSEYTLNFSSSDFTETASDKGDAIIVECNGLSYELAVGGEEWQKMADFLDSISKMILIKNGRVVDPVTGVDEVMDVLIEGAHIEEVGHNLSAAGAEVIDAADLVVAPGLVDTHVHFRDPGQTYKEDILTGAAAAAKGGFTTVVCMANTKPTVDNVETLKYVQEKGEKTGIHVLQAAAISKGLKGQEMVDMDALAEAGAAGFTDDGIPIMDEKLLLAAMEKARDLDMPISLHEEDPLFVKQAGVNQGKISEQLNYGGASRTAEDVMVARDCMLALHTGAPVCIQHISSANSVELVRMAKKMGADVHAEATPHHFTLTEDAVLKYGTLARMNPPVRTENDRLQIIEGLKDGTIDLIVTDHAPHSTEEKEKPLAEAPSGITGLETSLGLGLLSLVEPGHLTLLQLMACMSKNPAEFYRMIPGSVTQDAPADLVIFGEKERWTVDHFASKASNSPFKGWELPGKIHYTICAGKIVYQGMNEQKLIQNVIEQIKEAQLKLGAEKEVIRLYFPMASMNAILGTNYTDEQEMLAALRTNTVFDTTVLGRLKFFIHEGRFEVRVPAEGAEYVAGEISDPPFLKAIVELFAHHHSLTIEEICACFAQFDKAYHCEKMTPGTDFDYAVYFDDAEYDAYYYCVKMEMGHTIYHRFTKEDYQMLIDMKKGLALCMAAVLAMGCLLTGCGSSDTGAKSTTESAAASTEKVGTETAGTEAAGTETAGNGKTFTVGFDASFPPYGYQENGEYVGFDLDLAQEVCDRNGWELVKTPIDWDAKNIELNGGSIDCIWNGFTMNGREDDYTWTPAYINNTQVFAVNKNSGIKKAADLAGKNVLVQADSSALAALQDEENTDIKALADSFGSLTQVPDYESALMELEAGSADAVAMDEGVALTKQAQNDNIVILDDVISQEQYGIAFKKGNDELRDQVWSTLLEMEKDGTVDKIAAKYPSINTANICISDNEMTVMQIVQQLFGSMGITMEIFFVTLITSLILGLGLALIRMSKNPILSVIAKLYISVMRGTPLMLQLLVVYFGPFFIFGMQITPSYRLKAVLIGFALNYAAYFAEIYRSGIAAIPVGQYEAARMLGYSKTQTFAYIVMPQVIKRIIPPVANETITLVKDTSLAFTLAVAEVFTVTKQLVASQSSVVPFIVAGIFYYIFNLIVAVFFDYLEKKMDYYRMRLLEMNHIKKSFDGQEVLKDISIHVDEGEVLSIIGPSGSGKSTMLRCATMLETIDDGEIIYLG

SEQ ID NO: 1 - protein, 1048386 aa, Coprococcus catus (residues 349,463-698,924 of 1,048,386)
  misc_feature (108137)..(108140): Xaa can be any naturally occurring amino acid
  misc_feature (108150)..(108153): Xaa can be any naturally occurring amino acid
  misc_feature (110019)..(110022): Xaa can be any naturally occurring amino acid
  misc_feature (116209)..(116212): Xaa can be any naturally occurring amino acid
  misc_feature (882802)..(882805): Xaa can be any naturally occurring amino acid
  misc_feature (947835)..(947838): Xaa can be any naturally occurring amino acid
  misc_feature (1006423)..(1006426): Xaa can be any naturally occurring amino acid
  misc_feature (1014059)..(1014062): Xaa can be any naturally occurring amino acid
  misc_feature (1031697)..(1031700): Xaa can be any naturally occurring amino acid
  misc_feature (1033187)..(1033223): Xaa can be any naturally occurring amino acid
  misc_feature (1037812)..(1037815): Xaa can be any naturally occurring amino acid
DKAAFSKDGHAVYAKAADLKKIHSYYGLVFQNFNLFPHYSVIKNITDAPLRVQKRNKSEVYAEARELLKKMGLEDKENAYPYQLSGGQQQRVSIARALAMKPKILFFDEPTSALDPELTGEILKIIKNLAAEKMTMVIVTHEMNFAKNVSDYVVFMDKGVIVEEGKPEDVFNSENPRMKEFLGKFESMLFCSIEFIFLFMPIFLLIYYTVPEKYGNLILFLGSLFFYAYGEHRFFWLILVSLVIHYVLTRYSQGKSRKCQRICLVVMLMYGFGMLFIFKYMDFFVANWNHLAVWLADRGSSVKLPHVNAPEVSLPLGISFYTFQIAAYAIDVYRGQVKPEERFVDLGAFLSMFPQLIAGPIVLYHDVSAQLKKRVLSWRHMENGIKTFIIGLSLKMLLANTFGILWNQVQTAGVSAASVPMVWLGALGYTFQIYFDFQGYSMMAMGLGEMLGFRIPRNFRHPYMATSVTDFWRRWHMTLSGWFKNYVYIPLGGSRHGKVRMLFNMFVVWSLTGLWHGAGWNFILWGMYYFALLMIEKLFLLRFFEKYPVVGWCFTFPAVVTGWVIFASDNLSAVKTYLMQMFGHLSDAGYWTMNLDLFGQTVRQYGIYLVLAFIFSTAWPYGKYRENKNRPLTILILLVLFGLCVYKMQTAASNPFLYFRFMRGWIDWARKYPMTMLLIICCLIGGPYFGGQRAIEAYKNYTGKATAADVLGTWTQKAAEHSTLLKADAQGTKEQQAAKKGGPFTDVDQSYLDDAVFIGDSRTDTLKMYAGWENTTYYVKTGTNIWDIMDVVPDDEDRTIDEELQNKQFGKVYIMLGVNELGTGTAETYYQQFKKVVVRIRELQPNALIFVESIIHVSAEKDAEGTVINNTEINARNKWLKKLADNKTIFYLDYNEVLDDENGALKADSTFDGVHLQADKIEPWKQFILSHGVKMGLKTVVLNSERMNYDGKLDLSVLSSEVKEYASTEQDQILERVQGMDVVVTKEMPVDGDTIARFPDSVQLICEAGTGYNNIDIEAARARGITVCNIPAYSTERVAHTAIMMILNLSSSMQIQQAMLARGDRSNFTKCMQVSHVEVNGKVLGVVGAGTIGREVIKVAQALGMKVLAYTRTPRADEDNLKYVSLEELLKQSDYISLHCPLTPQTRHMINKETIAMMKPTAYIINTGRGALIDEPALIEALKEGRIAGAGLDVQETEPPVQDNPLYDMPNVILTPHMGWKGLETRQRLVSILAANIQAFDEGRPQNVVSMMNYIIVFLISMVPLIELRGSILYATGIGLPFLPAYITAIIGNMLPVPFIFLFARKILVWGADKPVIGRFFSFCLEKGEKGGKKLQAKAGRGLFVALLLFVGIPLPGTGAWTGTLAASLLDMDFKSSVVAVMCGVLLAGIIMGAASAGLFGALGALIGMINMLFNGVPANIMALAGLVFAFIMTCLLLVKCNDRLPKDQGREFAVNGALSAGKPRGAGFIFILVFIVSVVLFCELNTEIIIYLVLLAAAMMTGFLDDCSRAPWGELKKGLLDFAIAVMVAITFLNFNSNVVEFAIFGGSITIPPVIFGILTVVLVWVSINVTNCSDGVDGLSGTLTIITLISLYMVDQIKGMDPVFSHTILLFVICILAYLWFNATPSKLMMGDAGSRAMGFFISIAALKTGSPFIYIPVAIVLILDGGLGLLKVSLLRFLKIKILVNTRTPLHDHVRKVMGWSNTQAVFRFAIIQIMISAAVIYLIMMDFKKAAELLSLCKEYDKPISQIMMDRECEMTEKPLDEIRSRMAVSLQIMKDATKEAINQPSQSMGGLIGGESRKLSDLQSSGKNIAGNLISKAIAYSMGVLEVNASMGLIVAAPTAGSSGVIPGVLLALQEEYDFTDDQIIDALFTCSAIGYLAMLNATVAGAVGGCQAEIGVAAAMAAAAVVELMGGTPEQCTDAASTVLMNMLGLVCDPVGGLVEYPCQNRNASGASNAIVAAEISLAGIHQLIPLDEMMDIMYTVGKKLPAELRETALGGCALSPSACAKCKIKHMAQLSAFDVLGPNMIGPSSSHTAGAAVIAYLAQKMINGPIIKATFTLYGSFAHTYSGHGTDRALLGGLLGFHTDDKRIRDSFRIASERGIEYHFIPNDTVTDIHPNSVDILMENEAGTTMLIRGESLGGGKVRISRINNVEVEFTGEYSSVIVVHQDQLGLVAHITAVLSHFGVNIAFMRLFRESKGQTAYTLVEVDGDLPKGIKEMISDNHYVHDVMIIEPMKLTIGKRVKELRVKNKMTQEQLAEAVDACVGYISKIENNRVNNISLSLACELASVLNVSLGYLVGESTENEMMDEEMLRKYGACTADEKRKLLKIVDILRDEDMSTIKKFLNLIFIDGLSGMALGLFSTLIIGTILKQAADLIGGDFGYYLGVFAVMAQRLTGAGIGIGVAYKYKSSTYVTLSAAAAGMIGAYATAIISGSILSDGALVYSGPGDPLSAFIAALAGIAVGSLPAGKTKLDLLITPAVTIIAGGAVGIIVGPPVSTIMTRLGDIINWGTVQQPLIMGIVVSVIMGMVLTLPISSAALGIILGLSGPAAGAATIGCCCQMIGFAVASFRENGVGGLLAQGIGTSMLQVPNIIRHPQIWIPEILSSAILGPIAISRFVGMTNNATGSGMGTSGLVGQIMTWQTMTAVESPVLVLIKIFLFHFILPGLLTLVFSEAMRKKNWIKSGDMKLSIMQEGEARREQLLQMLRDSTAPISGSALARSLGVSRQVIVQDIALLRAVNKDILATTKGYVLYSQQTEACHQIYCVNHSDDAIADELNTIVDNGGKVLDVIIEHEIYGQITANLILENRRDVAEFCDRLKHSNAKPLNIIAGGTHYHTVEARSEVMLDNIECALREKGYLVRAMHLIYMNPICKHQEEMPVGKILMTNMITLKSYFVKEKDMIMRYYNQTNYPHVPYPTLTDLPELGRSDTTVRDAGCGLCASCMVVENMTGREFPLIDCLELSINVNANHSPGTDLTVLGPYIAERFDLDLVITDDPELLRAHLKKGYMAVACSAGDRPEEDYIGVFSHGGHFIAVVGIEEDGEHITVLDPSLMPDKYQEDGRRDKVIVNGNVLHTTMKVLAEDCRYREIKYYADGDFKKWLEQEEPDANKDRYFLFSPKASESRMENTNEKTAGQKLQEELTWKFPSVALEAPERVKEAYDFCEPYKAFLSEAKTERECVAKAEAMLKDAGYTEFDPKASYQPGDKVYFNNRGKAIIASTFGTAPLDEGVRLNAAHIDAPRLDLKPTPVYEKNDIAYFKTHYYGGIRKYQWATIPLSLHGVIYKKNGDAVTVNIGEDPADPVFYISDLLPHLAARQNQRSLAEGIKGEELNILIGSIPYPEKGLKDPVKLKVLQILNEKYGIVEADFYRAELEIVAAGPARDVGFDRSLIASAAHDDRVCAYPALRAELDTLHPTYTTVTILTDKEEIGSVGNTGLHSDYVRHYLEYLAENAGVSYKDMIQHALCLSSDVSAAFDPTFPDVYEAGNSCYLGKGCVLTKYTGARGKSGSSDASAETMSKVIGIMEANNVYWQAGELGKVDEGGGGTVAQFIAGMNIDVVDLGVPVMSMHAPMEIVSKMDVYEAYNAFVAFYKMQKKNILISVIDGQGGGIGRQYISALTSVLPKDLPVTIRALGTNSLATSNMLKGGANDGATGENAIVLNAGRSDIIVGVVAIVVANAILGELTPTMAQAIGASNARRILIPFDSCNTRIAMLSNGPLQAFIDQAVRMTTDYIGELLMDILNVILLSLFSLIALFILTKLMGYRQMSEMSMFDYINGITIGSIAAEMATSLEKDWWLPLTAMIVYALAAIVLSYISVKSMAARRVISGKPLILMDHDTVYEKNLLKGKIDLSEMLLQCRVNGYFNLSDLQTIILEPNGRMSFLPKSDKRPVIPEDMSMTPEQEFLVANVIIDGHIMEKNLQHAGKDIQWLNKQMHAQNISNLREVLLATCDMHNQVTFYQKTHQKMTSDILDMITLLQNGAWLLNGQEIVEDTADSTAILNSKLGYVPEKKDAATQTMAYNILQAHNTSDSKEHLKIKFDKMTSHDITFVGIIQTARASGLEKFPIPYVLTNCHNSLCAVGGTINEDDHMFGLTCAQKYGGIYVPPHQAVIHQFAREMLATCGGMILGSDSHTRYGALGTMAIGEGGGELAKQLLCRTYDINMPGVVGIYLTGEPMKGVGPQDVALAIIGEVFANGYVNNKVMEFVGPGVSNLSAEFRIGIDVMTTETTCLSSIWRTDDKIEEFYALHNRPEDYKELNPGKVAYYDGMVVVDLSAIKPMIAMPFHPSNTYTIEELNANLEDILDDVAKRAAVSFDGAVDYTLKDKIVDGKLYCDQGIIAGCAGGGFENICDAADIMRGRSIGSDKFTMNVYPASTPIYMELLRNGVAADLLATGTVLKTAFCGPCFGAGDTPANNAFSIRHTTRNFPNREGSKLQNGQVASVALMDARSIAATAANKGFLTPATDLADIEYKHPKYHFDKTIYDNRVYDSKGVAHPEVEIHFGPNIKDWPAMTALTDDLIVKVVSEIHDPVTTTDELIPSGETSSFRSNPLGLAEFTLSRKDPAYVGRAKAVRALEEARQAGGCPCSGGTELSDEVKAVIENIKKAFPDMDAKKTAVGSTIYAVKPGDGSAREQAASCQKVLGGWANIAKGYATKRYRSNLINWGMLPFIYPEDELPFANDDYIFIPGIRKAIEDKLTDIPAYVVGEEMKPITLKMGELTDDERKIILAGCLINYYKEAMDKIKMTTPLVEMDGDEMTRILWKMIKDELLLPFIDLKTEYYDLGLEYRDQTNDQVTIDSAMATKKYGVAVKCATITPNAARVKEYNLKEMWKSPNGTIRAILDGTVFRAPIVVKGIEPTVRTWKKPITIARHAYGDVYKATEMKIPAAGKAELVYTNEAGEETRELIHQFDGPGIIQGQHNICASIESFAKACFNYALDTHQDLWFATKDTISKKYDHTFKDIFQEIFDAEYKEKFDAAGIEYFYTLIDDAVARVIRSEGGYIWACKNYDGDVMSDMVATAFGSLAMMTSVLVAPDGTYEYEAAHGTVQRHYYKYLKGEETSTNSVATIFAWTGALRKRGELDNIPELMAFADKLEKATIDTIENGTMTKDLALITTMKDVTVANSEEFIKAIRKTLEAALMGIEENEEMDEFDTVTLEMEDGSEVEFAILDEFEMETEKFVLLGEIEGDNINTDPDGMLFMKAIMDESCEEDEVILNVIEDPEKYSAVVDFYAELDMAENTKKQDLATGAELTLEEKINKIKSREITEAEKNMLTLPAFEAACEAVKKVTQETGLIYSKYFSDHTGNKIYFKPENMQLTGAYKLRGAYYTIGTLTEEERQRGLITASAGNHAQGVAYAAQCYGVKAVIVMPTTTPLIKVERTKAYGAEVVLYGDVYDQACEKAYELAAEHGYTFIHPFDDLRVATGQGTIAMEVIQDLPLVDYILVPIGGGGLATGVSTLAKMLKNNIKVIGVEPSGAACMKASLENGKVTTVSPVNTIADGTAVQTPGTKIFPYIQKNLDGIITVDDEELVVAFLDMVENHKMIVENSGLLTVAALKHLDVKGKKVVSILSGGNMDVITMSSVVQNGLIARDRIFTISVLLPDKPGELVRVSQVIADKRGNVIKLDHNQFFSTNRSAAVELKITLEAFGTEHKKEIIQALEEAGYKPKQIRPNLMTYTFSAIMSFLFISSSSITRLSVSPQFSKRFANITHLLMKIVLAAINAKYIHANLAVCSLRAFSDEYKEQIQIKEYTINQYTEDILADLYKEKADMVAFSCYIWNMGMVEELTELLHQIRPDMPIWFGGPEVSYDAAECLERNPGVTGVIRGEGEETFHELMQYYIDGSGKLEDIRGIVYRENGQLVDNGWREVMDLNKVPFVYEDMNDFKNKIIYYETSRGCPFSCSYCLSSVDKKVRLRDMSLVEKELQFFIDHEVPQVKFVDRTFNCNKKHAMAIWRYIKAHDNGITNFHFEIGADLLDDEELAILSDMRPGLVQLEIGVQSTNDATIQEVSRTMRLDRLAKAVHTVNVGHNIHQHLDLIAGLPYEDYDRFRQSFNDVYQMEPEQLQLGFLKVLKGSRMYDMAETYGIVYRKKAPYEVLKTDWMSYDDILKLKGVEEMVEIYYNSHQFEQSVTYLMHFYEAPFDFFEDLAAFYEQCGFGKVQHGRMQRYDILLQFAEKRHLGKVVNDMAAADKKKDIQEVHGDAIEILKATMLYDLYARENLKSRPEWAHEILYRPLCEDFYRNREMTERYLPSYEGCTARQMKRMTHMEGFAMDIRATAASGQWTGKPEVLLFDYKERNPLTYAAKMTAISVSECNAEMEETANGMVKDYVVFDLETTGLSPDKDTIIEIGALKVIQGKVADRFSEFINPHQKLTQQISELTGITDDMLAGARNLQVVVGDFVDFCEDYVVVGHNLGFDYRFTKMAAEKYHLPFEHEGIDTLKIAKTVHKDLPSRSLGALCEHYGIINSSAHRAYHDALATAKLYQTLAHYFETSEPKLFVPEKMGFKAKKQQPMTKKQKAYLKDLCKYHKIEFNDAMEQMTMSEASRWIDKTILQYGRMKRFNRSDRNEMNKKTTKIISTIIVALIVISMVLSMVIQFVMKKAWKGILGLLMAMTFTVSAGRMVYAETVDENHEVPDGVTVNGMELGGLTVKAAEDKLQQYMDEVCGGSVTLTVSGEDVTFAYKDFDMHAADSTVVQDICQIGTKGNLIRRYKELSDVKNNKAEFTLKFEYDHNKLKKVISEKTETYNKEAENASLVRHSGEFIITDDVTGVKVDTDATTAEVEKALGDGWDGSSQKLDAVVEETKAAHTSDELKQVTDLLGGYSTDYSSSSSNRIANIANGASLVDETVVYPGDTFSFLNHVTPFTAANGYYQATGYSGGRVVPSTGGGICQVSSTMYNAVLRAELEVVERSNHGLTVGYVPLGADATVAEGGVDFRFRNNLDAPVYIEAYTYGGQIYVNIYGHETRASNRSIEFTSVTDKTIKPGDDVITKDDTQPEGWQEVTQSAHDGYVASFYKKIYVDGSLQDTVWINTSYYSASPRYITVGTKKESSDDISDQKEEADNTSGDKKNEMLDYGKVTDTIYKRSVRKVIERNVPGAGDDRIGGRDILYFAADSDKAMLTAFATLTGNQLAAAGAVHLAVNRLAAAGAYALAVNIQLIVSAELPEKSIKALMGSVSESCGKLHITSVQADVAAVPGLTETVITATAIGEAGGLFEPEKAEADQDIIMAGYAGDYGAAKLAFAGQAELERHFNPVFLSPMMEADYTGDTISAVSAVKAAAAAGVRSMYACGEGGVYTAVWELAENAGLGARIQLKEVPLRQETVEICDYFNISPYQLMSAGAVLLTATHGQKVLAELAAAGIPAVIIGHLTDDNDRVVLNDEEVRFLEPFRYESLNQAKSESMNEMKEKILSVIEKNSKISIKDLAIVLGEPEEEVAKAIYEMESDKTICGYHTIINWDKTNREKVVALIEVRVTPQRGHGFDHIAERIYNFPEVDTVYLMSGAYDFCVMLEGKTLKQVSAFVSEKLSTLESVTSTATHFVLKKYKDHGTIMVSETNKKERQLITPMRNPLSDKVIDIKPSGIRKFFDLVVEMNDPNVISLGVGEPDFDTPWHIREEGIYSLEKGRTFYTSNAGLKELKEEISAYLERKCHVEYDPANEIMVTVGGSEAIDIAMRAMLNPGEEVIIPQPSYVSYQPCVVLADGVPVIINLQEKNEFKLTAAELEAAITPKTKILVLPFPNNPTGSIMTEEDLKPIAELCVKHDIFVISDEIYSELTYEYPHTSIASLPGMKERTVLINGFSKAYAMTGWRLGYACAPDVILHQMLKIHQFAIMCAPTTSQYAAVEALRNGDDDVATMRESYNQRRRFLVHTFREMGLDCFEPFGAFYIFPSIKSLGMTSDEFAEELLKKEKVAVVPGTAFGDSGEGFLRISYAYSLEELKEATDRMARFVSWVRKEKNLMSMNIVLLEPEMPANTGNIGRTCVATGTKLHLIKPLGFEITDKMVKRAGLDYWPHLNYEVYENFEDFLEKNPDCIGKLYMATTKARHIYTEVAYEPDGYLMFGKESAGIPEEILVKYEDYCMRIPMEYNIRSLNLSNSVAIVLYEALRQHQFAQMELQGHLHRLHWHEEMENKRIIQVDEKVPVKLLIPLSIQHMFAMFGASVLVPFVFGINPAIVLFMNGLGTLLFILITKGRAPAYLGSSFAFLAPAGIVISKWGYDYALGCFVAVGFCGCILALIIYKFGSEWINVVLPPAAMGPVVALIGLELAGTAASNAGLKDEVLLPANIIVFLVTLLTAVIGSVVFRGFLSVIPILIAIIAGYVASLACGIVDFSKVAAAPLFALPNFQTPKFNMQAIAIVLPVLLVITSEHIGHQIVTSKIVGRDLLKDPGLHRSLFADNFSTMLSGFIGSVPTTTYGENIGVMAMTKVYSVYVIGGAAVLSIICSFIGKMTTLISTIPGPVIGGISFLLYGMIGASGIRILVDAQVDYGKSRNQAMTAVVFVTGLSGISVQLGSIQLTGMVLACVVGMIMGLAFYILDKLKLTNDRDEMKPRNNGVEHKSLEERAAEFGGQLNLDGEFDRPPTVGRERWDEYDNEAPTQMNKMEKFENVTYFNHPLIQHKISILRKKETGTNEFRHLVEEIAMLEGFEALNDLPLEEVEIETPIEKCKTPMISGRKLAIVPILRAGLGMVEGILALVPSAKIGHIGLYRDEETFEPHEYYCKLPSPIEERTIVVCDPMLATGGSAIDAITMIKKHGGRNIKFMCIIAAPEGVKALHEAHPDVQIYIGHLDRCLNEHAYICPGLGDAGDRIFGTKMNEKALRILEYPKIIDMLTGYASSPMGKELCRNLMPSSDISEILQGQMETSDALTRVMKKGSLSFSGIRDIRGSLLRLKVGSTVGMAELLNIAATLDVALRAKSYGRREADDEDQDSLEGLFAQIEPLSNLNHEIRRCIIDEETMADDASPTLKSIRRQIKLTNERIHSQLASMVSSQNIGSKLQDNLVTMRNGRYCLPVKAEYRSQVQGMIHDQSSTGSTLFIEPMAVVKLNNDLRELGSKEKEEIEHILDTLSELAGESAVMLEQDIAVLTRLDFIFAKASLSRTYNGSEPVFNENGYIHIKKGRHPLLDKKKVVPIDLILGKDYRMLIVTGPNTGGKTVSLKTVGLFTLMGQAGLHIPAFDHSELAIFDDVFADIGDEQSIEQSLSTFSSHMTNIVRILNAADAKTLVLFDELCAGTDPTEGAALAIAILKTLLNRHVTTMATTHYSELKVFALTTDQVCNACCEFDVATLSPTYRLLIGIPGKSNAFAISGKLGLPAHIIEEAKKNIDVQEQNFEELIADLETSRATIEKEQEELSAYKAQVESLKKRLEEKHDNIAKQKERILNEANEKAQNILQDAKDYADHTIRTMNKLSKSGGVDMKALEQERSRVRDKLNQSNNRKKAAPTAQKAKVYAASDFKQGDSVHVRSLDLKGTVVSQPNSKGELSIQMGILKSRIHFSDLEPIDEEVINTPMINKTGSGKIKMNKAAHVNTSINLIGETVDEAMIDLDKYLDDAYLAHIPNVTIIHGRGTGALRKAVHEKLRKSKYVKSYRLGTFGEGETGVTIVEFKMRYINELKSGDMISDIYLCKTKQTLKTKAGKSYYSMMLQDKTGTVDAKVWELTPGIEYFEPMDFIKVEGQVTSFQGSLQLNLRRIRRAKEGEYIPADYMPCSRYSIEDMYKELMGYVDSVKEPHLHELLELFFVKNTAFIKSFKEHSAAKSIHHGFVGGLLEHTLSVTKLCDFYTTRYPHLNHDLLITAAICHDIGKTKELSLFPSNDYTDEGQLIGHIVTGVEMIHDAIREIPGFPVVLANELKHCIVAHHGELEYGSPKKPALMEAMALNLADNTDARMETMTEIFDRSEDNLEWLGFNRIFESNIRRTSKMEKKTIKKNDIYTIEIEDLSTDGSGIGKVDGYTLFVKDALIGDTAEVKVIKTKKHYGYGRLMRIITPSPDRVEAPCPHARSCGGCQIQHLSYERQLAFKENKVRNLLSRVGHVEDYVMHPIIGMEHPYYYRNKAQFPVGLGKDGQIVTGFYAGHTHVIVDSAHCCIQAPVNEQLLVIVKKWMTDHDIAPYDETTHKGLVRHILTRVGFKTKETMVCLIINGKKLPHSESLVEALREIPGMTSISFNINQEKTNVILGSKVVTLWGQDYITDYIGDVRYQISPLSFYQVNPVQTEKLYGAALKFANPGPNDVIWDLYCGIGTISLFMAKKAKQVYGVEIVPQAIDDAKRNAAINDIHNAEFYVGKAEEVLPQTYEREHIHADIIVVDPPRKGCDESLLACITQMQPKRVVYVSCDPATLARDLKYLEERDYKVKEVQCVDMFGHSVHVETVVLLSQQKPDDTIEIDLDLDELDATSAELKATYQEIKDYVLKEFGLKVSNLYISQVKRKCGIEVGENYNLPKTENPKVPQCPKEKEDAIKAALKYFAMIMKSTFEKMGGTYTLGADGIYYPNLVSTDEEPHYGKYGMMRKTYLKEHRPAMYSLYMLEDRLTEHLNAVDNEAQERMGILVRQMMERQSITEELKARDQMAWVRAVNGIRNMAEEIVLNELIYRMNFVLIFCNSTAGRLIYAYSHYNMCAGGVRQFGAEYIVGGNPVWMEKEKAEIASLVEKYGRVQSLMKYVNKDTLKESYSKQPKGKAVGADGVTKEEYGKRVEENIENLIVRMKKFSYKPYPVRRAYIPKGNGKMRGLGIPSFEDKVVQGVFKEILEAIYEPKFKEFSYGFRPNKSCHDAIQRVNKHIMADKVNYIVDADIKGFFDNIDHEWMIKFLEHDIADKNFIRYIKRFLIGGVMEDGKRLETESGTVQGGLISPVLANVYLHYTLDTWFDYVKKHEFKGEMYMVRYADDFVCLFQYENEARKFYQLLIERLKKFGLEIAEDKSRILPFGRYKGTKESFDFLGFTHYNAKSHWGKYCVLHRTSKKKLKIKREEAKKWIWEHMHESIADTVETLNIKLAGHYRYYGIYGNYIGLIKYYVYVRQELWKSKRRRDQSYWLTWKKYREILKIHPLETPKIYVTSAYMYQISNEKFGLFVTELRKEKNLTQKDLAEKLYVSDKTVSKWERGLSMPNVVLLIPIADILDVIVTELLRGEKIDTQKNIDTKEVEELVVGSLDMAVRNSIHQHRKNWILAYLLCFLISITEIIMLVASGNSIAEMKGDILLVTGLMLLFGAWFCFFAKDMLPTYYDANKINYVSQGIFRIHLVGLSFNNGNWMYICTTLKIWTLATVVLYPLAGIIIINCLNIALWDILNKIFLIMILGGMVVSIYIIGKKYEMDKVNGKLTVFFEEPFWVGIFERIEDGKLSVAKVTFGAEPKDYEVQEYIQKCYFSLKFSPVVETVVKDIKRNPKRMQREAKKQMLEIGIGTKSQQALKLQQEQNKQERKEKRRKKKEAEEQRMFELKQRQKREKRKGHMKKKVLAIMLVAMSIMLISACGKKENLYEIPDLSQYKTDYVGDSSNVINIVSGQEYPEGYSYDSIEIQSETEPYGLTVFLKDEPSAVKLEDELQVNADMTFDLIGNLGTIDYKTADSKEIIVSYERMAIYHMQAKVVSRGSGRSAVAASAYMSCSRMYNDYDGIQHDYTRKQGLIYQEVMLPSMAPLEWNDREQLWNAVEENEKTKDSRLAREFVVALPVELDKDSNISLLQNFIQKNFVDMGMCADFAIHDTDGHNPHAHILLTVRPLNENGTWQYKTEKEYLCIKDGEEKGFTASEFKTAQKQGWEKQYRYKVGKKKEYLTSSAAQEKGYERIDKHPKSSRYGRQNPISEQWNSDEQLHIWRANWADAVNKMLARNQINAAIDHRSFAAQGITEQPTIHEGYIAQNMEKKGMIADRCEINRQIRADNKMLRELKAKVAKLAEAVEKSIPIIAETLEAIRNHMIFTQYHLLHNEMQKEVIHDWMNHFNPILNKYNTVKKKLKAKVTERKELNVKKEKTSILNPIQHIKLNQQLTTVTEEIEELKSRKEQLIFQAQCSTDKDMTNLSKKYGQMNNNLDILDSQDISLKKQLEKDAAAFREEKFRPEPEQYTELLDTRIQIRPDFRDKLIEQLKGTFGKYYDYHRRDIAANEVDYLNVEDPDVFSHRAWELECQRKQEMRRNQPAWAKKKSYDMELMADKRTITPEEKALLQAKHRQEEAEARNRKKERDARTHRLVQEGAILESIVPHIKEMDLDSLKRELMIRLRGMMTRFTEKATAITPNREIQPDEYFNETDHLIYCSKCNTPRQCRHELQGKVLIPSIRCKCQQEIFEQEEAQRKLHEKQMEIEHLKTSGLQDKALYDYTFARDNGINPEIKLAHNYVSNWEEMKANASGFLIWGDVGTGKSFFAGCIANALLEKGVPVLMTNFSRILNTLTGMHFEDRNQFINSLNRYSLLIIDDLGIERNSDFALEQVFNVIDSRYRSKKPLIITTNLTLSELNNAADIAHKRIYDRILERCIPVRINNRNIRQDNASANLKEAKKILLSNPDLNQNMTDFLTADTNLPSYMMFPRFLLDMEINETAKMLYIILLDRARLSQKNEGWSDINGHVFIYFTIEALAEVLHKSQMTVKTALAVLEKQELIFRKRQGPGQPNRIYVKLPKETIHYTDRFLSLRQTENCPIDRQDSFPDTDRKLSGNKKEIKKNNLEKRGSKEPLSPYGKFQNVFLSEKELEDIRQTIPDWKDYIERLSGYMASTGKQYQNHAATIISWARQDHPASRQRNYESEEYETLMQNNIRNTNLRFNLGKEQQRRAWEYLQTMDRQDFKSYSQVISLALVDYFDRYYRTQADPYLETREREELFVKQIVDAVENSLKQALPLFLSGLTAGMAQREPQIRASFPTPENSQPDSDVDWDFLGEMRELRNTKIIAVDHGYGNMKTANTVTPTGIKAYETEPIFTGNILEYNGIYYRIGEGHKEFIPDKAMDEEYYLLTLMAIARELNVFSIREADVHLAAGLPLTWIRNQREAFRSYLLQNPEVHYLFNGKEYHLRFVGCSLYPQGYPAIVNQLGNFKGTNLLADIGNGTMNILYVNNKKAQESRCWTEKLGVNQCMIAAKNAVLDKFGVKIEESTVEQILRFGTADISAPYLDCISSIARQYVAELFSTLRKYEYNPDLMRLYVVGGGGCLIRNFGTYDKSRVTIIDDICATAKGYESLAYMSLKRRGMNKRRYSNRRRKNILRVFILLMTIIITVVMWRTIKIDVQVGELTLPKISQSEKSFADTSGEWNLILVDRNHYIPNNYQVELTELSNGKKVDSRIYPELQQMFNDARAEGLALFVREGYRTTEEQQKIMDEKINEYEKQGYSAKEAKKRAEKYVAIPDTSEHQLGLSVDINADTDKCSSEKVYQWLDENAYKYGFVKRYPEDKTDITGISNEPWHYRYVGTTVAKIMKEENLCLEEYLEKYKMEYKTDSLLVHLARAGDEDACEKLVKKYYSSIYQYCLLHINDPYEAEDLTQEVFTRFFSNLYRYKEYGKVKNYLYTIAGNTVKNYYKKKKDIPSEELLKSEDCSKNHVEELGVRLTIEQAVRKLPEEIRETAVLYFFQELKQREIAELLHIKLSLVKYRIGRAKELLMKELEVKKDEELMKNYKQQIKEYKEEIEEKYVRAETENKTVKACQNILSESVLSKQSHRTSYFEFLYEQTKFIKKRWWILQGCVLMCLWIWLSNYTSDIKDMMRIMGISATIFVVLIIPEIWKNRRNGAIEIEQASYYTLRQICTARMLMFGVVDLVIVMVFLAITYQTTILSLSDLVVNFLLPVNVSCCICFRVLYSRWEKSEYIAVLSCLVWVGLWIMIVANDVIYQKIVTPVWVVMLILTFVYFIFCVQKSLLFDEKILEDYTYEIRIMKLEFKNVTKQYGEVNAVNKVNCVMEKGIYGLLGVNGAGKTTLMRMLCTIVQPSEGQILWNGKDIWKLGGEYREVLGYLPQDFGYYSDLTVYDYMMYISSIKGLKIPFARKKVKQLLNQVGMEKFSKRKMKNLSGGMVRRVGIAQAMLNDPQILVLDEPTAGLDPNERIRFRNLISELSEERLVLLSTHIVSDIEYIANNIMLMKDGELFYAGTAEELVSSMKEKVWQCNVSRSMIDKYMSEYLVGNIKTTKTGAELRIISIEKPTEDAVAVEKNLEDAFLFYFGEKSEEKQDAMLKLELKRIFSKKINVFAIGLALILAVIFSGFAVTSNRYVDENGNASTGIMATRKLTDNRRAWKGTLTEDELGKVIEQNKNAMTQSSEENAIYGTTLQPIDDIRGFIISVLTPDAEYDESVLNQITEENVQEFYDTYHKNMEKMAEEYGKTSVQKKYLEKKYNEIKLPVEYESYSSWDTMIMYVETYSIILAIIVGFICAGIFADDFQTKADAVFFSTKYGCTKAVKTKILAGIATTVMIYCMGIILLSVICFGIMGTSGMNTPYQMYQAYSIYIMSYGQYYLLTVVCGFIASMLAAVVSMLVAAKMHTISVAVCIPFFLYCLLPFIGRALSGYTTLFNLIPTILTNVQASVKVPLIYQIGNCVFRQIPLVMVMYTVMAIALLPFIYKSFRRYGNKMSQPDFLYELFEDFMDDPANQDFSMDNGLVCRWLTGQAKISPKISAYYSKPSNQKKLAETIHQNLLPLMSDCNMAMQDIYTLFIQDDTISDVKKKNLASLYKPASSRLLFLAKLISFGMERQFIKRDTKNQKLIAGGALSPIVLDYIMDSEVPKPCRHFIGRDKELEELYTMLEENRHVFLCGIAGIGKSELAKAYAKHYKKHYTNILYVEYTGDLHQDITDMDFIDDPPEISEQERFQRHNRFLRSLKSDTLLIIDNFNVTATQDSFLSVVLKYRCQILFTTRSNLNEYCTFQLKEIKDINILFQLTSAFYSEADKYRSTVEKIIETVHYHTFAVELAAKLLENGISTPGQLLAKLQEERASLDNEDKIKIIKDGQSSKATYYSHIHTLFSLYALSRKQQDIMCNLCFLPYTGISARIFAKWLELPTLNEINDLIETGFVQTTTRHTISLHPMIKEIALSETKPSVSSCHILLDSLQKICLMHGIEVDYYKKLFQTAGNIIELIEKDDIPKYLLFLENVFPYMDNYNYQKGMKEIIQELKNFLKPKDIGTDSDRALLLDFQATLEIKPEKAIKLEKDALAQIENITADNARLVSNLHANLGGLYRMNGHPDLAREHMEKSISLLDQFNLLHINDSIPQIANYAMFLTEQQEPERGISELQKLSGIIKEYHSDDCLDYAKVQETLGTIYLMTANLPQAKTHFKRAFKIYEKIWADEPEMIEAKYQEIQELYPQIGFCIGKNLSGLLTKMQQNIEFERCIDFLVRMIDKYGEEVLRELEEEKQNKEEKEAAVSMSDKYFTVNIRAYLDKYEPTYIGEESLYDLLSDFSCPKNPDVEYFLLHNAIEFTKKDQSITYLVFDAEDASLVGYFSLTIKPISVRASNISKTMAKKLSRVSILDEETQSYTTAAYLIAQLGKNYSLPKEKRIPGNILLGFALETISSLKYSVGGVMEFLECEDNEFLLSFYTQNHFKPFDTRITASQNNEPHTLHQLLKFIMATSSITHNFVVSNPNSVKRFVAAIDEADRDRTPKQTLPGRQLTNPQEILALMSKRKKKHVMKNKKIKCDIYTRVSTTMQVDGYSLDAQKEKLKRYAEFQNMEIVNEYSDEGKSGKSVEGRPEFQRMLDNIENGTDEVQFVLVFKLSRFGRNAADVLNSLQRMQDFGVNLICVEDGIDSSKDSGKLMISVLSAVAEIERENILVQTMEGRKQKAREGKWNGGFAPYGYELVNGELQIAEDEAEIIRLIYDKFIHTNMGISAIAAWLNQHGYKKKKRQNNTLDAFASSFIKGVLDNPVYCGKLAYGRRKNEKVSGTRNEYRIVKQENYMLHDGIHEGIISETDWELAHQKREKTGVKYEKTHSLDHEHILSGILRCPLCGSGMYGNVNRKKKKDGTLYKDYFYYACKHRRLVDGHKCGYRKQWSEEKINNAVEEVIRKLVKNPKFEEAILNKIGSRIDTEEIEKEIDGLEKQHRQLTGAKARLGQQMDSLDIMDKFYEKKYQDMETRLYRLYDEIEGVENSIEEVKNRLLNIQQQKISEENVYQFLLYFDKLYDKFTDLEKKEFLNSFVEQVDIYEQEQPDGRFLKHIKFRFPVYFGDRETQELCWDNESTVETVVLLERKMSNESRDKHEKMIEQVAATMAIEDMPLSQACYENLRAMASGEKTREQITKEITEKYKKRRMLSNRQNLQQITDNGVGVSSDAVITILKDWRIQVGVYRNDTLTVFHAGFYFIDEMKKGIRKMLSAIACATLAMGCLAGCSSNTNSSVANTTTESAAENTSTAAAETASDSTAADGKVYQIGICQLVQHDALDRATQGFEDALVKLLGENHVAFNVQNAQGDSQTCATIANQFVNGGVDLIMANATAALQACSNATSTIPVVGTSVTSFAAALDIELDANGCTGINVTGTNDLAPLDQQAQIIADLFPDVKQVGILYCSAEVNSVYQAEHIAAYLDNLNIKHKDFSFSDSNDLQAVTNNCVSECDVIYVPTDNVVSSNQSIIDAVARPAGVPIICGEESQCTGCGLASLSIDFYDIGYRAGEQAYDILVNGKNPAEMPVEDPQSLTRIYNPQIASDLGITLGDDYQAIEQMTECQQKIKELREITGMNRRQFCEAFEIPYRTVTEWERGTRNAPKYVLKFMEYYIQNEKVKKENEQEVSENMRKRESFNSRWGFILACIGSAVGMGNIWMFPTRVSLYGGGAFLIPYFIFVILIGFTGVISEMSFGRATRSGPIDAFGIACESRGHRKAGEALGWIPVLGALAMAIGYTVVMGWILKYTIGTFTGAVLAPADIDGFAGAFGSMASSFGNNFWQTAALVICMIILMFGVGSGIEKANKIMMPVFFVLFIILGIYVAFQPGAVDGYHYIFRVDPKALSDPVTWIFALGQAFFSLSVAGNGTLIYGSYLPDTEDVPASAARVAFFDTIAAMLAAMVIIPAMATTGAQLDQGGPGLLFIYLPHLIKAMPGGRIIAIIFFAAVFLAGMTSLMNLYEAPIATVQEKTGLGRKASCLVIAAIGIVVSMLIQGIVSDWMDVLSIYICPLGAGLAGIMFFWVLGKKYVEKQVNTGREKPFTGLFFPICKYIYIPICFLVLILGIALGGIGMNIYHKYTAGDIKGTLEAQYKLNPVRLAMDAASFPVAAKDMARMRGRKVGAPYLPNKLTGPGKAFDKMHSEMKKATKSRNCHDIMSKIGLVLEGGGMKCAYTAGILDAMMDNGVTFDYCIGVSAGSANGVSFVAGQRGRNIRFYTEHINEKGYFGLSSFLKTGNLFGLQYIYGTLTNSGGADPLDFDAFMKSPMEYWLVATDAQTGKPTYFSKKDMHKDDYRHVMASCAIPAACRPVEIDGRFYYDGGVSDSIPVQKAMDDGCDKLVVILTKPHDFVKEPERDRFIYKRLCRKYPKIIEALDHRHIMYKACQDKMFALEKSGKVFVFAPEHVLGGGTYSMDAKEEEAIYEMGVRDFYVQQEKLKAFMKMNAYGTVLKQLIQLTGSKLSTISDVIGYDVSYISKWCNKSMLPAAKMAPEINRSMASLFAQEILSQEILGDFEKTFSTEVCPDNLENTIYTLLKENYSSSSSEASTELKQQTTYKPRILTLANDIYNFFDHELPQMLLNYDDTLDVLCTLDVCRFAMDRPSNAYSHLTAKHPVNVKIGIDTDLLYADNNDGLKALYYFINANRAISFDFYDNTLMHTLNTIVVKDRVAIICALDQYNRVNVASVIFDPEKVNQIYVRTLPAFRTSDLLAHATEQLEFYQHGYRTDFYTKDNFQFLLTLGFEYLLPQECWDKIINVAKEDYHDEFMALIVAQLQITWEEIFEKNTLDFYVLKSSLMKYIDDGEIIFADVIYHMTPEERKLHIENVLALSKKNRNIQFYVVDDEQLVNKQQMIQFSIFNNRKKLFLKNPGRYHTDVGPYFYSVLSDQLIQRISSYLDDLKNADYCSHYDAESLQTFYDKYSSLVHRMIDLSAFKKMGKVKVLTARQAADLIKDGDTVTLSGFVANGIAEALNAAAEERFLETGHPKDLTLFWVAGTGNKDGSHADHYAHEGMVKKVIGGHFNFVPKICEMLSENKIEGYNVPQGAIAQMLRDNAAHKVGTISHVGIGTFADPRNGGGRLSEKTKEDIVKVIELEGQEQLFYPRIPLDVAFIRGTYADELGNITLEKEMAPLDATSQAMAVHNNGGLVVVQVERVVKAGHLDPKLVKIPGIYVDAVVECPADDPKQSQSINCTYDPAYAGNTQVPVSSLEPKKLDAKKIIGRRAAMELKKNVVVNLGVGVPEWVSSVAAEEGVADEMTLTVECGPVGGVPGGGLRFGGSVNAQAYMDEGYQFDFYDGGGLDLCFLGLAEVDNNGDVNVSRLGTRITGSGGFTNISSNSKKAVFCGTFTNGVKIQTGDGKLTILEEGKKHKFVNKVTEITFSGVVAGKAGKDVLYVTERAVFALKTDGIHLIEVAPGIDVQTQVLDEMDFAPIVDRDADGNVKLMDARIFKDEVMGMTIEMENLFANTGIGKHIIRTHHWGIVLPTLEKAEAFMKTFGLQEDYRGHVKAYDADLIFTKHGNGVDAVEFIIPLSGVLTEFNKGKGGIAHVAYLVDDINAVSEEVKAMGYELLEKEPQEGTEDIIVNFIRPKYTQGILVELIQQVGDINYDATFTSRWGNEKMYTLGIDIGSASSKAVILKDGTDVVASAVVQVGTGTSGPGRVLEEVFSNVDLTQEDMDYTVATGYGRFSVENADKQLSEITCHAKGIFHLVPSARTIIDIGGQDAKAIQLDAKGNIQKFVMNDKCAAGTGRFLDVMSRVLEVPLDQMGKVHFQAKEWAQVSSTCTVFAESEVISQLSKGLPRESIVAGVHQSVASKACSLAYRIGVKNDVVMCGGVAQNAGVVDAIEKELKQSIIVAPHPQITGALGAALMAYEELKKANKMEFNAMEASAKECLAYYQAKLDEEAWEAKKNGKLVCWSASVAPPEFCVAMDIAMVYPETHAAGAGARKASMDLLEVADEKGYNIDICSYARTNLGYMELLKQEALTGQKPEKLANSKAAYVPLPDLVITCNNICNTLLKWYENLAKELNIPCIIIDVPFNHTMPVSRHNKEYIADQYRAAIKQLEEITGRAFDYDKFFAVQEQVQRSVFWWNKVATYAQRKPSPLNGFDLFNYMALIVCARARDYAEITFHKFADELEAKDAAGQYAFGAPENEKHRVTWEGIAVWTYLGATFKGLKNQGAVMTGSAYPGLWSLVYTPGDLESMAEAYTNVYINTCGPNRYEEFYKVVKNSKSDGIVLHLNRSCKLMGLLNNEGAEYVNAKLGVPYVSFDGDQTDPRVFTPAQYETRVQALTEMMDENQMRTAKEIINEFKAIADNPRKAMDDYKKETGKGAVGIMPVYCPEEIVHAAGYLPIGMWGAQKKQISKARTYLPPFACSIMQSVMELQLEGVYDDLEAVIFSVPCDTLKCMSQKWNRPVPAIVFTHPQNRKIAKDAANVFAREEFNIVKEKLEDILDVHISNKAIKNSIAVYNENRAACREFSDVAAEYAAVVTPSDRHAVIKARWFMEKSRHTALVKELIAALKAEPAPEFKGKKIIVTGIQVEPYDVLDIFQENGFAIVADDLAQETRNFRQDVPDDDDALMALARAWNEFDGCSLATDANKPKGQMIIDAVKKYGADAVVVCMMKFCDPEEFDYPILLQEFEAAGVKNLYIEVDQESTAFEQVKTRIQTFAEILMFAIIAFIPIIVTIIVMAGFNWPAKIALPLAWLITAVVCFFGWQMDFITIAAHTVSGFLTSIDTIVIILGAILIMNTLKHSGGMDVINHMFTNISDDPRIQLIIIGFMFGAFIEGAAGFGTPAALAAPLLISVGFPPLCAAMVALVLNSTPVPFGAVGTPAATAFNMVSGEVAESGIANGEAWKLGLTKWVAIPSAIICPIIIFVAMCMMCKMFGKTKSIKPALECIPYILMSAVAFCVPYIICAMFLGPEFPSLIGALIALVICIVTARKGILVPKSKFEFPARSEWDAAWKSATAEETEQTETENKVVESKISPVMAWVPYGLIAIILVVTRIPQLGIKGILNVSTAPFAVSLSHIFGVEVNWSFKWAWNPGVLPFILVALLIIPLHKMKAEQVKAAWKETGQMVGGAAIALMFGIAMVQLFRNSGAQFNHSGMDSMLIVMANGMADLFGKAYIIVSPLIGVIGAFISGSATVSNTLFSTLQFAAAVRLGLPAMLIVAMQVMGGAMGNMVCVNNIVSACATCGTVGTEGRLIRSNIVPCLIYAVLTILILGGMIMAGIDPAAALHMTKTFIINKGQKPSKEQIREVMEAKKYPIEPDEDAPELSPAMYKAFKSSVIQRNRKKNAMVDTVLFDLDNTLLDFNKAEKMAVERTLREMGVTPDERMLMRYSELNLAQWHLLEQGKITRSQVKVQRYVNLFREYHIEGDPAEAAKVYEAYLAIGHYYVEGAEELLKHLSEKYRLYMVTNGTLSVQKGRIKSAGMRPYFKDIFISEEIGYDKPGKAYFDYCFSRISNFHRENTVIIGDSLTSDIQGGKNAGIRTIWYNPHQSQNTSEIQPNYEVNELSAIEDLLEKIMIRLLALDMDGTCLNGRSRMTEETIRTIRKAADAGIIIVPTSGRPLTCLPYQMTQEKGLYRYTITSNGAQVVDLEEKKTLFRMLMKRERVVQFLRECEELNVVRMTHIQHRYVMEGPLMEVAGRIVYGRDVDGIRRVNDMEAFVEKIHYDIEEVQVYFFSGRTRRKVAEILEGYPEFSSAFGSKYVEIFAKNTSKGTALNALASRLGIAKEEIACIGDSANDLPMFEAAGLKIAMGNAVPELKKKADIVAYSNHIDGAAKAIEQYILMLYFSCCRRSGEIFRSMEIHCVPENVYAALVSSHYFKEKMEEQTLHILNECSSGCKMAIHSMQQVLEYVENEKLEQVIMAAERKHKEIAARTAKALTCYGEKGKKPGAAAETFAWLTTEMKMLIRDDSSQIAKIMTNGCNMGIQSIMEVLNENPEADRESKNIAGDLVKAEEHFADELKAFLMRKGSKVIKIKYEEDSIFVGAAWGRKRTRWGRKGARLTLEAISDYLKKGAGVHSEEAYLDEVKCDLLRLIRKRLYQQALKDGKEIKEYECSFEGVVIWPGKNKFICFNFGDGAVLGKTDQGHIGSLLLSEKRIRKLPQLTMDGAVSAVGLKRGVWSAYHELYILEGRQERWAMSVSEDKIEEGENPLLLSIKACMPLYTDMIMDNFEDYANHHEDDGVIKLQNMPEDASMEQWGAKLQEIADEFICAPRYFLMCWLASYCLDKDLLDDETYTREFPAFTYQREGGRKKFGFQPVSKEYAQNLEEDERDQYIDILSEIAASHSGDKKAEWRGVFRTAFLWHKKKKKMISKEDGFKIAHGLDMSYTLTDFFLTRVLENDGFDFTKSADVIHAYCCFRSKCYQDFLELEALYAEAAKGVAQGTIEEKPEHFTEGMLPGDEEGAGRNQDNSLFGLVEKWKSENIEIVDAEKHLDNVDLKFIDWMKEKAPFLDLPGKTACEIFKRLTAFVYADTEERQQKLEIQRENGQNASDDDWDDEESLEEDDWDNVERNIVSDLKGVYSEGSLCQLNQMVGEAFIKEIQKCLNELSGKLYKNHPERLARYLSVDANGEVNITVITSRLPLLLSGKANVTKADMLFMLWVAYTLYQRETGEPEALSDRVWSFMELANDVLEKAFLPAFYIPHILERSFLISLCMNGLESENEDIFYFGESPYEIYAAMCQFSVSVTKAMRDYLKEKTFIRFPGGECYEILGMIGEGGSGLIYSAGKVVRQGENYVKENSLRFALKECYPISRQFNFLRMQSGEIVPENESEVAANYLRCVASMQLNEGQMTSEIYDSEAIRLIPIQRIASSVEISFDKGQHFHYVNNAFTVMASMENKGESIASWYQKNGRYTMEMIFRVIQETLFAVREVHLAGYLHLDLQEGNIFVTGQPTDESLTCFLLDFGSARKRLADGLCAPVGDQPIFSSEGYRAPEIVGIMTGETPDFRLGPEADLYSIGYLLLYLLTGRRYSTRMLEDVRKSYDGHYLTRKNIQDMKCPPHAEEIIQHILEKALETDSKKRYHTAEEMLKDVSAALNALRPYHSQIAGMKYDAYILYRSDNILHKHVAVTLQKLLEHFRTPGLKRIQRVFLDETELSADYQADKQVMDALKASRYLIIIGQDSSGDDIWQSKEVKFFLKTHKPSDVLTILAVQNPKQSEISESSKAAEASNVSGTSEVAGIAAVSEYAVVKVGGRDRNFPLAADIRGASEKEILKKLKKDGFLRIAAPILSVPYDGLVQRYRKYKLRKRITMAAVCLSVAAVFTVYALYQSYQIALQETIARRNKAQNLCVQAMDQYDRGDKEAAIDSALQMNAEAGDTENYVIPEQLYTLNTALDSFESGYRMHYSPLQKVSGDFSQVAFSKNGGEYSYAINQEGELEVFSAKEEKMIWTLDTAAIQSFVDETIETEDGIQFVEALDTHRAIVFIGKDSVVKDVHAYALVIDADSRSIISGFPLEEPIISYRTAAVSCNERYLVYEASKLKLYVYDIEKGSQVECILAETGNKEYQFTDVSICEDGSKIAIGTEKRLIVYDIESKQLQTIANVPIGKVVWTDNSHVACMSYQIQQEYFASSDPWSREKRQYAIEVYDITNQGDAETENEKTTADAVMTDLAFDTDTMGLKVIHRNVTDENGNTETKTALLGWMRSNLYFIDAETGKAEDVLAFQSDIVSIQSRTDSEDSIFVALYDGKVMQVTTGETIGKRKAYEVDNELDGFSYTSDKKLMMYTEEGIVLCGLSKDGEMVQHSFSSDSSDDRFVDATGSMEEMRLSSGEAYRLMWLNDTSREEGTIVRHAIEVYPLHSDELLLHYECEDGNTIKMVKLTENDTGTFLCVLELANDRNDETTGKIKVLSLDEESEQFSYALDGQEGVDASGWLWMTDIMPVQDLCHAMTLNRDGQLYWVDFEKGTVEPLSFDENECEKILSMSMSPDGRKILLLGVKKDYLQLLSYDVQNQQIDADTTWQSEPTSNPENAFLAENSDGSQVAVYDGNAECYLIETAHLKQKQVVDIENAKNLQLSFFENDQFLLGADSECIWLYDLDKHQVVSSYAVSMRNHAMQLTADISGSYFTLKEIWVTENIRQDEGMSKQNCHIYFVDESHQIYPYADVAFGYRLPDEEMVYQFNSDGYAEHPLYTFADLYKKAQKEMKNILLFAGTTEGRLLAEFLIHQPVRLHTAVATAYGASLLPSAPSMTVSSHRMNEAQMIDFIQQQHFDLVLDATHPYASEASANISGACTRTQVPYLRILRDCQTSADTSSNPIHPSEIFVDTTAEAVDCLNHQEGPVFLTTGSKTLPDFMKINNASERVFVRILPNAEMLTACMSLGLPASHIFCMQGPFDVGMNTATIQHICRLWEKDHPDSNLSETPLYMVTKQSGRTGGFDEKLEAAAQAQVPVLIIGHPVRENGLSLSESYHWLSNWIGTSPSESTAEQTVSLIGTGMCADQLTLEADRTLKSCDVIIGAGRMLQMAEHYHKPTFCSYNYPAITDYMLSHPEYQHFAVLFSGDIGFYSGAASLRRCLEGQPFKIEAFSGISSPIHFLNTIGKTWSDVHLISCHGQTASVISHVRRHAKTLALLGKPDDAANISQKMIDYGLSNVHLYIGADLKQPDEQIISGSPADFLEQTFSALSLIYIENPDAEPLPVTYGLSDDAFIRGKVPMTKSEIRSVVLSKLKLTKNAILFDIGAGTGSIAIEAAQQIPDGRVYAIERNPDGLDLIKENSLRLQADNLTIVSGTAPESLDALPAATHAFIGGSAGHLKEILQLLYSRNSEIRVVITAITLETIGQIMALQKEMALPEPEIIQIQVSSAKKAGPYHLMQGQNPVYIVSFMTEMKMPRVMIAAPGSGSGKTMITCGLLELLRRAGRPISFKCGPDYIDPMFHRFVLNIPSRNLDTFFTVPDRTRSLMGKACMKEGADLAVIEGVMGYYDGLGGVSVRGSSYELSVQTGTPVILVVNGRGMSLSIAALIRGFMDMYPDQMIRGVILNRVSKGVCERLTPIIEEKLGIAVIGYVPETEVICFPSRHLGLMMPEEIVSLREQIQKFASLLEETLDIRKLKTIAEAAEPLNWKEDPMHVQRLEDAGSGKLRIGVAMDAAFCFYYEDNLDFLRELGAEIVYFSPLTDAALPENLSGLYMGGGYPELHGEQLSQNASMKQSIREAVEGGMPCLAECGAFMYLHEAMEDADGRFWPMVGLVPGKAVKKGRLVRFGYAVLTSETDTILGPKGLQMPVHEFHYWDTTCEEGCFEAHKPLTERRWHCMYQKKQLLAGFPHFYFQADEEMALHYVEACRNYADGYLMRTGNEERKVEDIKFLKAQLNQQLFMISQPNEKVMEAAWQRWDSIGKPLRSLGALERAVVKMAGMENTVNVKMDKRAIVVLCGDHGVVKEGVTQTDSSVTKIVADNIASGKASINIMAGKAGADVFPVDVGMMGEHYPNKEFQPMVMCDRKVAQGTGDIAVEPAMTQEQCLRAILAGIEVVADLSTQGYEMIGMGEMGIGNTTPSSALVSVLLNLPAEEVTGRGAGLSDVSYNKKVAVIEQAVKRYWKATEDSEIPDGPFFKIDAAVELMSHLGGYEIAAMAGMCLGGAVFGVPIVLDGYISVAGALCASLINADCTAYLLASHISAEPAAWKVLRNLHLEPVIQAGMCLGEGTGAAAAMVLYDMGLAVYRQMETFDDIHVEPYENYAKRQADEMILLVTGGSASGKSEYAENRALQLAKTEQKKLIYLAAMKPFGEEAAKRIERHRQLRAGKGFETVERYTDIEGLCRDESLEAKTFRQKAKDAVVLLECMSNLAANEMFSGSDSDADCTGEFEAMDIRRVKDRILRGIDALSEVSDHLVIVSINVFEEGMQQYDAWTRAYMQCLGELNQALTRKADMAVEVVYSIPVPYKEGVTCNLMQSLIIAFAMYSKIPMPRADWNDKNMRYAFCWFPVIGLVIGLVELAVFYILTKWQAGSVFRGVCLMAVPLLVTGGIHLDGFMDTTDARSSYGDREKKLAILKDSHVGAFAVIGCSFYLILSAGAWSEIDAKGIVVMAMAFVLERAFSGFAAVNFKGARKDGMLTAFREPARKRTVTVVLAAEAVISTIVMCYLWLPVGLLCSLGAVLTFVYYYKMAMKEFGGTTGDLAGWFLQTCELVMLMLTVVGKMILAMIFVTGGCFQGKQQWVLQNCQVQPFRVADGAVCSMEAIKSAGVLDHFHLLVRRWMQAGKIPADETEKILSDNPDIVIITDEIGSGIVPLDIKEREWREVHGRICCQLAGRADAVFRVIAGIGQKIKMKIKIWLIRHGMTAGNRQQRYVGTTDELLCEEGRQQIILKRQLIKSDQDIQNVYVSPMLRCRETAEILFPAVSQITEAGFRECSFGEFEYRNYQELNGHPDYQAWIDSGGTIGFPGGEDQKAFCDRVQTAFEACIRDDVMPKARNWGQTYAGQNAAEKEFTTAMVVHGGTIMAILSKWAMPHQDYFHWQVKNGCGYLVCLDTDEWLAEKGSLSVIEKFMHGIIVLVGGFLLDCLLGDPHNPWHPICLIGYLISFLEKKIRKLFPKQPKGEFYGGLVMVALVLFISTAVPIVLLKAAKWIHPYLALVLEIIMCYQLLAARSLRDESMKVYHALHQHDIEGARKAVSMIVGRDTQRLDAAGIAKAAVETVAENASDGVIAPMIFIAIGGVPLGFFYKAVNTMDSMVGYKNEKYLYFGRAAAKLDDVMNYVPSRISGLLMVASAALTGGDAKRAWHIFCRDRYNHASPNSAQTEAACAGALGLQLAGDAWYFGERYHKPTIGDAVREIEDADIIRANCLMYGAAMLCLVICVIIRYLLVGMAKVIMVQGTMSNAGKSLLVAGLCRIFRQDGYRVAPFKSQNMALNSFITTEGLEMGRAQVMQAEAAGIEPSVRMNPILLKPTSDVGSQVIVNGEVRQNMRAAEYFKYKKSLIPDIMAAYNSLAAENDIIVVEGAGSPAEINLKSEDIVNMGLAKMLKAPVLLAGDIDRGGVFAQLVGTMMLLDKEEQQMVKGLIINKFRGDKRILDPGIEMLKDYTPVPVVGVVPYMHVDIDDEDSLADRLDKHTEKGLIDIAVIRVPRMSNFTDFNALERMQGVTLRYVEKVQQISRPDLILLPGTKNTMGDLKWLRMNGLEASVLKLAAEGTLVMGICGGYQMLGLTLEDPDGVEEGGSMRGMELLPVHTVFEKAKTRTRVSGKTGTLHGPWQLLSGTAFEGYEIHMGETTYEPGGTVFSAIAETVGTQHVDEAMANGCQYQNAAGSYVHGLFDSVEMQKALLRLLCQKKGLPEEAVSWIDEKVYKEQQYDKLAEGLRENMDMAKIYQILEEGLAMKIELENVLPAEIEKRSFEIITEELGDRVFDPLQEPIIKRAIHTSADFEYADSLCFSEHAVEKALDALRKGAYIVTDTQMGKSGINKKVMAEFGGEVCCFMSDPDVAETAKKNGTTRAVASMEKAAKLDRPLVFAIGNAPTALIQLYEMIQEGRIRPELIIGVPVGFVNVVQAKELIMTAGVPYIVARGRKGGSNIAAAICNALLYMLDSSRGQRMKKIIFHIDVNSAYLSWTAIKLLRDGSETDLRKIPAIVGGDMSKRHGVVLAKSIAAARYGIRTGEPITDALRKCANLTIVPPEHHYYSQCSRQLLDLLHHYTSAISQYSIDECFAEYVPIPGDSGDPVRAAHIIKDTIRDRLGFTVNIGISTNRLLAKMASDFEKPDKVHTLFPEEVPVKMWPLPVRDLFMVGHASAAKLELLGIKTIGDLAKMDPALIEAHLKSHGRTIWEYANGIESVHIDERTKTDTSNKGIGNSTTLSADVTTEEAARKVLLELSESVAGRLRKAGFLAGMVSVEIRYNTFENVSHQMQLLSPSQATQVIYEAAGQLFHELWNGTPVRLLGIRTSKLSDCQVRQMNLFDYVRNDKQEKLDQALDNIRQKYGSKAVMRGSFLEKKRPPKATPYDMKNIVFIGMPGAGKSTIGVVIAKIFGYDFVDSDLLIQNQEGDILEHLIEKHGIEGFLQIENQVNRDINVKKTVISTGGSVCYCDEALKHMSEHGVIVYIKTDYESLHQRLGDLHQRGVVIRNGSTLLDLYNERTPLYEKYADVVADVSGCRIEKAIDKIKNLLKACAKLYEEMKNRISKKRHNSYRKRERNFRDWPKNPHFYGALAMLLPLTAILIAYIAMGVFPFGNQATMIIDSYHQYVPFFSEFHDKIWHGESFLYSWHGSLGFNFIAVQAYYLASPLNFLIALFPASMMIEAFETLIVLKICLSGWTAYRYLRRRTGRNDYSTVVFASFYALGGFSIAYNWNVMWLDSIVLFPIILMGVEKLINDRDGRMYAVSMGLAIFCNYYMAIMICIFVVLYFFVIWFSRKREGIRQFLRSGIHFVLCSVLAGGMAAIYLFPTYYTLINSSQGSAPTSFKIYRNFLEIFRQQFALVEPTQLTGAPNIYCGVLLVMLVVFYAVSKTIPLREKIGRLFVTGFVLVSLNINVLDYVWHGFHFPNNLPGRFSFIYIFMVVVMAYDAWQSLRLTNKKVFFGIFAAEAVLFGVCLWYPKDRLPLYSMIVTGVLMALYMILLIAHRRHASLTIKGIKVLPKYLCLMVLTVEVAGNAIFGLCMNGTTNRTNYTEDRQEVADIRSRYEAKDTFYRMELEQIRGRDDVTWHHLNGLSFFSSTADDREEKLMGALGFYNSGNKYSYKGATPLTDAMFGIRYIISNDEIWASNLSLCEQTENKYIYENQQNLALGYMVNPGVTQWKIVEGDPFVTQNDFVRMATDTQGAMFIPLETGEPQVTDGMLTSTGEDKYYYERHGSGGSLTWQLTFTEQQDVYIYFEASHCEKLKVTIDGKTETYSDKRGHIVHLGQCDAGKVVTLDFPMDSEYETGNVKLQMYALNQDIFDSAYAQLADEQLQVTNYDSTHVNGHIQVNQDGMMLLSIPYDEGWHIYVDGEETEIQPLGEAMTGCWMTAGEHQITMRYTPQGFVEGAAISVISLLILVLGIAGKAGLFSRHHRKMMEQYLIKGGNPLVGEVEIGGAKNSALGILAAAIMCDETVTIRNLPDVNDINVFLNAVISIGAEVRYPNPKDRHTVTINGCGIRTHEVDNDYIRKIRASYYLIGALLGKYREAGVALPGGCNIGSRPIDQHQKGFKALGAKVWIDRGMIFTSADELNGKHIYLDVVSVGATINIMLAASRAKGMTIIENAAKEPHVVDVAQFLNQMGANIKGAGTDMIKIIGVDRFRAADHEIIPDQIEAGTFMCAAVATKGDVTIKHVIPKHLESISAKLIEMGAEIEELDDAVRVVATKRLSPTTVKTMPYPGFPTDMQSQIAVCLSLADGTSLVTEKIFENRFKYTDELTKMGANIKVEGNTAFITGVDKYTGAVVVAPDLRAGAALVIAGLAAEGCTCVEQIQYIQRGYENFEEKIRSLGGIIERVDVEDRTDRDRMMRKMSLAAYMEKLLFTSESVTEGHPDKICDQISDAILDAMLEQDPMSRVACETCTTTGLVMVMGEITSNAKVDIQNIVRDTVREIGYTRGKYGFDADTCAVMVALDKQSTDIAMGVDKALEAKEHTMSEEEIAAIGAGDQGMMFGFATNETEEYMPYPIALAHKLARQLTKVRKDGTLPYLRPDGKTQVTVEYDEKGKAVRLDAVVLSTQHDPEVTQEQIHEDIKKYVFDVILPAEMVDEHTKFFINPTGRFVIGGPHGDSGLTGRKIIVDTYGGYARHGGGAFSGKDCTKVDRSAAYAARYVAKNLVAAGIADKCEIQLSYAIGVANPTSIMVDTFGTGKLSNSRIVEIIRDNFDLRPAGIIRMLDLRRPIYKQTAAYGHFGRNDLDLPWEKLDKVDTLKAYLMKLLTRIKISYFLAFICPVVLILATVVGVMKMGLNSMEQKYDLDQSSYEMILDPMSMLGHMTASTVEELEQVTKEDPDKLLDQVYLKKLNERLSNHSSYLLVKKDWQNIYSGLPKEGNYKDDLNYSPKDGKDESLYVMDEQPYHIQQTNFTFSDGSVGQVLIYTNVAQIVPQIKKLVAQIIITSLLILFAGSFIAMFWLYKSIVHPLNKLKTAAENIKDGNLNFSVAAETDDEIGEVCVAFEEMRLKLKGQIERNIQYEKESKELISNISHDLKTPMTAIKGYIEGIMDGVADTEEKRNRYIRTIYNKVNDMNSLIEELFLYAKLDSNSVTYSFAKVNVDAYFQDCVEEISLDLESQGVDFGYFNYADRDTVIIADPEQLKRVVNNIIGNSVKYASPDRKLMISLRIMEEAEFVKIEIEDNGKGIARNEVPLIFDRCYRTDASRNSSKGGSGLGLSIAKKIIEEHGGKIWAVSTEGVGTTMCFVLRKYKENNVYEMSKILIVEDEVAIAELEKDYLELSGFDVVMQHTGDAGLKAALNEDFNLIILDLMLPNVDGFEICKKVREKKNTPIIMVSAKKEDIDKIRGLGLGADDYMTKPFSPSELVARVKAHLARYERLVGSGVKANEIIEIRGIKIDKTARRVYVNGEEKAFTTKEFDLLTFLAENPNHVFTKEELFNKIWDMESIGDIATVTVHIKKIREKIEFNTSKPQYIETIWGVGYRFKVMKVTDEVYREYSQMVYKYLFSLTGDAHVAEEVTQETFYQAVRCAGRFDGSCRFSTWLCAIAKNQLNSYRRKHFVPFDDTEKPEALAKTGAGKTDVTPEKTVLSEYGRVEILRKLHQLDEAVREVMYLRIFGDLSFAQIGEITGRTENWARVTYYRGKEKLRKELDGNEMSDKLRCEIVQDLLPSYVDGLTSDETNEAIKDHLADCVSCRDMYERMKADETSAEENSEVMEKEKKEINFLKKIKQKHRLNLMLVVVILTVFFAAVYYHQTYQKGKEMSADEIDYSLQWNSNDSQLNILGNFKNANRGYTRLIGEEDEDGITHLKIYSSPVGSRHPNQFVAGYSKVNAADQVWLGDRIIWDQGENISKMTSDLYQAKTPYAGDAVAVKTLADTVGVGNHFGAYHISLETSEEPYDCQFIIQYPMKGEKKEKALEQMKKDACVMLALVDNLGSVSWGYMMTAEDNNGVETLQMTAEEASAYVGKNIKTCGESPKALQEMLTQLDFITDDGFYVVSGTERDENYNFKVVIYHSQQVDMDGLNCGFGFESRIGTVCSSVMYWEQEEHPEQTVITVSPDRFNRTLTDEEVSKLTLSVAVRDTSGEWHEVCEALPLHAKYGDLLKYTLEENSEDGYSLKENMDNRMNILQKALQLFYEKGYDAIGVQEIADAAGVTKPTLYHYFGSKYGLLEAVAREDYVQLRDGLAVRAEYAGDLPMNLERLTKFYLDFCSSHEAYYKLMMAMMYSAKESDTYKVIYPCMQEIIRMLTDMFLKAGDIIGNMRGRQEQYSIGFFGMLNNYMLYWFGRDAESRPELSEGQAHELVHQFLYGIYVMALEHRISELDTYLFAKGRHYEIYEKMGAHLAEEDGKAGTYFSVWAPNARSVSVVGDFNNWDRTAHPMQPVQQSGIWDIFVPGVKAGDLYKFAVETSQGYTVLKADPYGNQSQLRPDNASVVADIRYFDWTDQAWRKAHQEKKTESPMAIYEVHPGSWKKDPSMPGEFYNFKKLAVELADYVLEMGYTHVELIGLSEHPFDGSWGYQVSGYYAPTARYGTPADFMYFVNYMHDHGIGVILDWVPAHFPKDEFGLGRFDGTALYEHQDPRKGEHPEWGTYCFNYGRTEVSNFLVANALFWIEKFHVDGLRVDAVASMLYLDFGRSSGNWIPNEDGGNQNYEAITFLKHLNSIVAQRNPGAMMIAEESTAWPKVTGDVDDGGLGFTYKWNMGWMHDFLEYMKCDPIFRKYHQNQITFSFMYAYSENYVLVLSHDEVVHLKKSMIYKMPGTMPEKFGNLRAAYGLMMMHPGKKLLFMGQDFAQTAEWNEAKSLDWHLLEKYPEHQQLNHYYCDLLHFYQNEPALYELDDSPEGFAWINGSDAEHNMLTFCRMTKDKKNCLLCHFNFSPVAYENFQSGVLCPGTYTEVFNSNAAEYGGTGLVNPEPIEAVKESWDFKDYSIKYHLGAYGVCIFKFDYVEPKPEEPQKPAKRYTKEDIHKLAGHYKKVKMLRFLIRGLLGSFFITVFSFFLTAAGIVLPVGVNVLTFLSCAILGVPGLLLAYGLSFIQIYVMILQMTLLLFMAAAAVKDYRSYWVPNELILAGALNGYILRFWADGSGGVIDGAAGMVLIFILCAGFFVLSMFGAGDLKLMMAMAVYMGPVKSVRILIVSLVFGAVISLLKMLKYDICRERFRYLLHYAQRIQRHGAEPYMDMSHLQGREYFIIPFAVPLFLALAAEIVVWNIGSLMKNVTLLILEKRKSYGERLAAFLGRQAYSPFNIQLYLEHPISDEKWKKADLVLITSSLMALYGEKVKEGNVCILDESGQIIGMEGRNVYKYQSAGVIYQRLLELCEENGWMLQGERNHGKKECVCAGIYRPVNNEKSFLKVLEMCRQKGKMGNLLYLNFETVTIFEQYMEGERRQEGLSEIIYYVKQRSSNLGMKVERMAVKGPVEYIAGAAMPMEMWELEEEDWRFCLERLCKDTKYDQILLDFGTVMPPGIVMDSCDEWYVAGEHAPWSEQLTERFLKAAGKAAGEGFSEKVKRLNVEEMEQFQNLKQQLQETVRQRMDMSSELSDAQIGEIIDSVIMEKSREVYMSAVTKLTLRQELFNAIRRLDLLQELIDDKTVTEIMVNGADAIFYERDGRIYTWDRHFESREKLEDVIQQIVSRSNRQVNESIPIVDARLKDGSRVNVVLDPVALNGPILTIRKFPEEAITMEDLIRWESISQEAAEYLKVLVKAGYNIFISGATSTGKTTFLNVLADYIPKTERVITIEDSAELQIHGIENLVRMEVRQADGDGVSNVTLRDLIRTSLRMRPDRIIVGEVRGEEALDMIQSIICTIMNIKYRLLCKRLIEERKRVGVIQYYNVLFIMELVSDKDIWSLEQWVNGINNIYMKDIHNWCRIHFVKYHTVFVYRKEYPVKANIWNGYSYIRWRMERMMNLGMDGNTEDLQKFVPQVHFEQIPIKNLCSNQDYQRNLSIKHVQRAAANFDLYQINPVKVSRRDGINYVFNGQHTIEIVALISGSRETPVWCMVYDDLVYTQEADIFANQMKYVKSLLPYEIFMANIEAGNDRELIIRDLVESYDLSITSSSRPGGICAVSTLINIYEKYGFHTLDRVLRLCVATWEGAPMSFSSNMLNAIARLDNAYGETMKDDTFKEKVGRVSVREISRTARERRAGSLGFAEALLLEYNKKSKYSLPFEKLYTHKTPKKRETSTEDESDQSSTPEGQLDLFSTDQDNAQALPNDMRNYSIYTLKTKLEFTNLYQYLGEKDYKQLEQQILCHSYYTPICTWNGIVINGIEAYELFRKHSIPFRIKRLHFSSKEDVISWICTDQLKREDLTNINKKYLIGKKYDAEKILVSRQLSSTNKSHISGASIAAKKISEECNVATATVYKYSAYSSALDIIDEKVPDLVKRVRSGQLWISQANIIELSGLSKEQLLSLNNYLLAEKIEHLSYHDMKRELLWNNYAKPILKKESSVSIPSIRNLPQFDPDAEIASLTLTIPSWNSSIERVLKVSDFKIASDTAKYKLKYQLMCLISTTNNILKKLEEIMSEQPTNQWNMTTEPSDMMKINTPMPITVASSPSNQMEVTDDDSFSYDGYQVVRGEFFAHIYEPSFTLNNYKVSVNTACIKKLPDVEYVQILVNPIEKKLAVRPCREEEKDSFRWCSSGKKRSPKQITCRIFFAKVISLMDWNPNYRYKILGKLIRSGNEILFIFDLTSPEIFPRTLKDNGTVTTARTPSYPEEWKNQFGIPVEEHQKSMQVNIFEGYAVFDIQEKKKVTDKSTEKAKKPSTAESEEKSYEQQTLFPSTNMYMKESEERSSNIDEQKARIRQRYKGIDPEELEVIPALPPEDIFKTEKKLRVAVYARVSTDDPRQTSSYELQKNHYQDVVNKNPNWMLVEIYADEGISGTSLQHRDAFKKMIKDCEAGKIDLIITKSVSRFARNVVDCIRYVRELSSLRPPVGVFFETEHLNTLDPKSEMILSFMSTLAQEESHTKSEIMNSSIEMRFRRGIFLTPPLLGYDQDENGDLIINPHEAKIVQLIFYMYLNGSSAQQIADSLTELGCKTKKNNDVWSSSTILQILQNERHCGDVLARKTWTPNYLDHKSRKNNQDRNQYRKVGHHEAIISRDDFIAVQKLITNAKYGNKEILPELHVIQEGSLSGFISINPRWSGFKARDYFEASQSVLKPENMNAPDTITASAGSFDLRDYEVARGQFFSSVGRISVSFSYKQISFNKDAIRKFPNIKFVEMLIHPRSKLLAIRPCSSETKNKVQWSRLKDGQPIPKPISGAAFLPTLYEIFKWDKKCKYRILGVAHQKDNENVLIFNMDDTEIRIPTTTNDVSSPNNNTPDTISDSKSVLAYPADWMNSFGNNYYTQSQAPELTEFTADKNWQTASESKPYKEPELQTTPKETIIQNIKNIITEIKGDTQMEINYALIGKRIRETRKQRGLSAEELAEIADLSTVYISYIENAKRKPSLESLIKISNALEITIDELLYGNLLYNPTEYQTDIDLLMADCTSTEKRYIFEVLSAIKNILRINDWHLSSRHNYDADNPNDYMADKEEIKTLEELEEKGRILREYKEKFRQMCQENKMIKGSTVLKLYDKIEEVQREYEHLDNKLTLMEYNFIMRTEDYIADNIIALCKKRDMSKYRLSQLTGISQSSIGKIIAKESLPTMPTVEKICDALGVTMAQFFAGMDVPVSLSESQQEVLNIWNNLDEKEQNVVIQMLRGLQKMVIEKKYYDIAQRELEEMQREINAEKAQMSEEEILEDKKWHDEQLETIIKKAEAHMRRFKKVPDPQKVVKFTFLQKAALEIARNMQMNIKTERKEDDLWGTIEMSFNNMWFLDSAPSEWKDIWNNLMKEAQRVYIEAKDNMIMYQYYYDLAVEVPCVMTDAEQRESARQFVNRWMGKGKEDEDGRSYWIDLLTNVLGMDNVTERLNFEKKVVIDGNTKRIDVYIPETRVIIEQKSLGKALDQKIRNSGDVDLTPFEQADRYNGKLTFDERARWIVTSNFAEIWIYDMNQKQPEPTKIALDELQSKYPLLDFLVKKEVKTISHEMEVSIKAGDIVGLIYDAFLKQYRIPDIKEKDETSEQKEKREHKLKSLNALCVRIVFCLYAEDAGILGKRNMFHDYLETYEVKDCRRALIELFKVLDTPISDRDEYLEEDLAQFPYVNGGLFADETIEIPPFTEEIKELLLTKASEDFDWSDISPTIFGAVFESTLNPETRRSGGMHYTSIENIHKVIDPLFLEDLQEEFNAIKQIQVKRTKDKKLDEFQNKLATLTFLDPACGSGNFLTETYLSLRRLENEVIRERVGGQMTLVEAHNPIKVSIQQFYGIEINDFAVTVAKTALWIAESQMLEETKSIVYGFNDDFLPLKTYVNITEGNALRLDWNEVIPATGLSYIMGNPPFVGARWMNKEQKKDMELVFHGIKDFGNLDFVTAWYKKASDYIQNRDIFTAFVSTNTITQGEQPAIFWKPLFEMGIHINFAYRTFRWDSEANLKAHVHCVIVGFSHAKSNKRKVIYDTNGDMKIAENINAYLIDSDDIFVGSRKHPICSVPEIGIGNKPIDGGYYLFDKEEMEEFIKQEPKSQKYFHPWYGAREFINRTPRYCLYLGNCSPKELRELPECMKRVEAVREYRLQSTSAGTRKIADTPTRFHVSNFPKGSYIVIPQVSSERRRYIPMGYMDESVLCSDKVRIMPMGTLYHFGVLESNVHMAWMRAICGRLKSDYSYTVNHVYNNFPWPELQEKQKERIEQSAQGILDARALYPDSSLADLYDPLTMPVELRKAHIANDKAVMAAYGFGIKMTEEECVAELMKLYQKMQGMDAHKALITNIFNNSTLVEVPFFQRSYVWKEDLWGRLLEDMEFVVKTKKPHFLGSIILKEGRKPRQGENFADCRTIVDGQQRLTTFLIFMKVLCLKLGQTALFDCQFRIMGQMIALRHGRNDIQAFEKVMTLSKAEKIDNPEPASRIIGAFNYFVEHIDESKLDIMTIFVNTQFVRIDLDADEDEQQIFDTINSLGVNLTTSELLKNYFFNRETVGEYERKWADVFEKDDETKVYWDREIETGRIKRAIIDIFFDSYFQLFIQDKQYNISNEDKLMYSRVDRLAQSYQHFINKYCGGNKNVVLDQMKEYAECFRNNLKPNQCGMSIPKEEGIERINVVIFGLKNTTMIPYILYIAKNVQDKNELNKMYGILESYIMRRVVVHASTKSYNNLFTSLILNKVLDSQTLTLRLKGIGDATTYCPDDNEMKIGFETSKLVNLQSKGIIYLLESKIRSDNSSTALLGFNNYSLEHLMPKKWRNNWGACATEDDAKKRDSLLLTLGNLAIIPQALNASIRDAAWNVKKAGKGQNKPGLLLCASGLYTLHDVLQKNDWNEHEIENRAEWLLANAQNIWKIMDLSSLTPDKQVKLQYWLDVIRQCRASGLTNQIWCEQHDISLKSYYYWLSKIRKLALEELPRKKNGIHMCTDQQSTALTESPAEFAELSLPDRNISRSTPAAILHIGSITVELYEGTSAQMLENILKAVQSCMEKIYIRCGYTDMRKQLNGLLDIIQYNFKLDPYSNSLFLFCGKRADRIKAVHYEGDGFCLLYKRYENGRLQWPRTGEEAKQISDQQLRWLLEGLNPEQPKAVQKWLPHKSENTENPMSATEQEYKNHIKELEQQVRLLKEQVDFLTRKLYGTKSEKTSTLEIEGQMSLFNEIETCADPDAHEPELVEIEKHLRKRKYTGQREELVKNLPHSKVLHTIDEREQICDNCGSTMVKVGEEFVRTEVQFIPAKLKVIDHYRETYECRSCRKNGTPYMEKAPVPYPPVLHSLASASTITWLIHQKFELSIPLYRQEKEWEALGLRLSRATMSNWLLVVYRDWLVHIVHRLKLELLKQRYLHIDETHVQVLKEPGRKNTSDSYMWVYCSIRDAVNPIRYFEYQPGRSGKYPEAFLRKYEGYIHTDAYSGYNAVSGVKRCLCYTHLRRAFVDALPKDIHNSEASKPAEAILRLNQLFNIESELEALPPDQKKKERLIREKPLLEAFWSWAEKSAIGELPKSKLSKAFHYALNNREGFWTYLEDGNCSISNSLAENCIRPFVIGRKNWLFSGSPKGAEASAGIYTLVETAKANGLAPMKYIKYILSDMPGSAFLEHPEYLDDYLPWNPLVKEFCRMMEESIWKHDRSKRCTYRLVWQGRLLGINQRDIGRENRSDRQMEKMMNTKTEGNTFTKKIGQTVYVVRYHFNENAKETMQEKINRMLVTEASRQAVYMLKELKKNKMSVVATGILFGVMGVLIIPMIAVIVKISNALSQKHPRIYKYSMIAFIGMLLAISLFCIVIKHQMSFLVIVACLAITLCDTIKNRMEISDLIKSARIEKGLTQQQLADVVFVTRQTISKWELGKSVPDQASLILLYQYLDIKDNEKKQLSKLIFNKQNIILILIAILFSPMVIGVRFICCKIDKIENRKIKAVIKVIGFVVFSSYLVSLKENVAYLLIGIFSLVYLLYQFYLSGLETKMNEFISNSGTLINPNSVYDQERFINILQIILQKKTQKELSEQTGLNNATISRMLNGARSGRPYKSTIDKIAKAIDDPELIQELYDATGYSSKKIRERKKIIADNGFSLDLSTVQVHEKFFSTLMRGLSMMTSLHKVEWTIKSGTPRSYDYLIELKEGNIDYWYIRYVDRITSDEEREKALTAIYGEFAKLKLGGKIKVSCATPSYEDYDYFVTIPPYQLNTNASIIHFDSELERFADETFLETALPLKENIPVKDFCNLTESLILMKYRVVSILKDNRPRFLIISDIEEIEILPSKYLKHLDQINASPNTVKSAAFALSYYYNFLQEQTIGLDEITLLSYSEQNKHFIDFLYWVKSGKHTEHNTQTSNKTCNMYLGAVFRYYQFLALEDVLPMLKVLRVKKVSYFDSMGVNHQNAVNSFKGFFKEEEPNLEEITSEEIQELLNACTNDRDRLLIAMMAETGLRLGEILGIHYTEDIDFERRTVRVRYRESNTNLARAKNAEYRMALLSNTTFEFLVKYISDNRKSLINSEYLFTKLTGKNKGEPLDADSVYSMLKRLSKKTDINSHPHQLRHYFAEERRKEGWDLNDIRFALGHKKVETTIKYLGENNERLIEATDQYYSNNEDLYQIADFLMAVLKIVPKLYQEKISEKLKEEISLITNGEAKYYNRLYKFFQYTDIQCTADINYKTRKMYMDSLEKEDISEKYKAELLSLFDRLKIENMPDVYSQGNPFSVEQEFFKQDKLFLLYVPNKKKAQSFRQVVDKNDLLWDLTRIHSSQLVRQTKILLCEILNMDKVQRHRRYFLEPLKALIRFCDKYGIDDIEEMEQADENRFYLYLNKESEIIKKQASKIVEFARRTLFLTDSETNWRACIWYMDRFQFDKSRINASSPVKSLSFINIYEKENRWYLQLYAKYLVGISDLSLSNIRNTISFISQFLKYLDGQSKKVTELEIQDIADYVSVLDESDIKYSTFNRYITHMHTFLQFLKMKNIEVLKFYPERFLKKGFSEHNERSVPEKTIAHLIKELPAFPEHLQLMYLILFCTGIRKSEVCTIKSGAFYSQGNENWMRIYQSKMRREKVIPVPSLLVGLVNDYEKKYGIKNGEYLFKNKKGGAFNGQTFSNQMIRECKARGIACGDYIFRAHDYRHNLATSMYGNGVSIQGVRDYLGHSSENMTKQYIDFMPERIVSAEDKYFSKNQSFKLKGAEDDERMKGNINLISYDCYQQATEKQLAGLKWKENRVYYISEIHNEKIQDEIYGYIDDRCRRLSLSTVVNDIYRFDLLKDFLNEKCTSCSSITDKKWEELERSYKAFLYKKGLALYVRRNRPDRRNVEQQSSAQVSFLKMYYEYVVKCKTADIPENEKDVWDMRKLDIVPRSNPIRGRYRLDFREIRQKEFKEIIKKILYSHCQTKAMGSIKGELRGFRRFASFMYDRFPEVKHFTEISRDMIEDYLVYIKTDTGLTSVSYTTELSVLDNLLDEIGRELEIENICNLFLSSDCRAYDNALPEAYSDAEIKRFNCALTKLKPQLGRCLIIHQMLGTRIEDTLTLRRDCLSEKSGHYFITIIQQKTRKYKRPVSDQLAELIRKAIEVSEKEHPDSEYIFLQDNGKLYTDSMLKYHVNIMIYENDIRDDNGNYFEFRTHRFRHTFGVKLTEMKLDDDSIARLLGHKDTRTIPHYRRLRNEALAEDTKAVRDEMNELLAQYRREKENAETRMQKHDKMVALAKEKSAEMTETAITAIETMYRKNIKISVAELTKLTGLSRGFFYNNPNVKQVMMELKEKQQGMILRNPKSDAIAKAQEARIKSLEQKLSDSVPKNEYESLQKKYEELQVKYSQMKKGTLLKMYDQLMQNEIYDEKNGLTYMLCGDYYLPELTLTDIEPTYGKYGMLRKSYLQEHRKAKYQILLLQGKLVAHLNQIDAEARDRKEQLVKQMMEKQGITEKLKRQDNMEWTRRMNTICHDAEEMILTEMIYTKGMLVKYIIKVFLCLILAVMTLIRWLLKIPIMLGNILLYFLSIIFILTGVLSYGFALESARECGRMIIIGMAFGAIPDFVPFLGKSLETLVAKLLSMTNEMLSRLETMALFASDIPIQAIRKQIASSIDIIVQLERLRDRSRRVTAIAEVLDCTEDAYILNPIFEFHEQDNLVMESSSYGDIPERVVGQLERTGYHLMHRRKLHAAALESAEIMNEKQKLLISDSLQGVLLGCLIGWLCYRSVITSLLGIMIVPLYIKYKRRMREKSRKQMLWHEFKDAAAMLYSSTAAGGTLEKALRDTCCDMKTSDSSYQVLLPEFERICMHLDQNRSLESVLEDFAVRSEDEDIAYFVRVLTVARKSGGSLSSIIRHTADTMNLRMEINSEIETILAGKRGEWRIMLIVPPGILCYMNMCSSEYMNILYTGLTGRLVMTAALMVYAAALWTGHKILDIHVMQFFWFGAILLCAALLPVFLAENWCRRHKVKKIFPVPRGMGWLQRTAVWLLCHLPDTISCSRWLTGCSEDIVGKLYPGMKKEKFIRQHVIRKMMVGYGGMLAILAFMMIYGLLNQTPELSGNNLQRDDAGGKSRDVQVSAEIEGVTEEKSLTITVEPRKYSRSEREALMRDVKAYIDACLQGDNSDLQHVNRPLFFPSDFPGENVTIEWQPEDYNLIRQDGSLGELSAYQLPIKTKVTAVIIYDQEKEFYSKEICLTAPEKSDEEVLDEQIREAVQAADQGSSEKLTLHLPDSVGGRVVEWKYQKQSQAGTILFIAFLFLAGCIWYQDNNLKKRLEERNEQLLYAYPGFVHRMILMLGAGMTVRRSWNRLLDDNDRLDSGHLKEDWLYREMKYTRIQMESGVPEIQAYLEFGQRMELQQYKKFSQLLIQYIKRGSKGMQALMQQEAAEAEKQRRDLAKQLGETAGTKLLMPMMLLLIIVLLIVMVPAFLSMMKDLCRRFFYEETAVGVVEMILILVVLIGLVIIFKQQLTSIVNSIFKKITSQSNSIMMKKGVMTVYFSIVFMLVMSFLLVLLESDRLYILRTEGERYADMAAEMVFAGYIQPLADYYSLFGVNHGEKNSQLEKFDDYLKLNITGEGKTKRLFQMAGAIDEVEVDEWTGFKDNDWKALTEQVELYEEARTIQRGSEEVSRFFSDLSGMDTDEPVGDYCRQLESKGERMEAEEQEANKKDGGNTPKDTEIQMEDPRGGITRWLKGGLLELVMGDQVVSKQKISTARCSWQTSEEKKSNVIVRFDRYKEVAEAVKGQNLLSQIQSGVKNQSDQMILNMYIYDQFKTLRNSRPSGRSKDTALNYEIEYIAFGHASDRENLESAVTACFTLRTILNLAYLYLSPDKDADLQRVVQGLSAAGMIPVAGEVLKLLLMICWASAEAAVDCAGLAEGGKVPLMKDRNTWNMSVEQLLHAAAGGGKASEYFKSGTKGWDYHQYLMLFLMLTPTEKKIIRMTQLIENNVWLMKGYENFQLKNCAVKASFSGKIDVTPFFWKYPQKIQYRFHTEYAYMLFFYKSHIPIFSYTGHFKKIYNAVKCAIPTPILKKGVQWKKYLKNKKAIGETDNSKKRAVSFASFAGSLTVEAALVLPIFLSAMLLLSGLFHAMSVCSQVNHYLCMTGRKIAAYSRSEKGVDQGTLYQLFYSEIGGSGIDSDDIAGGYAGLIPRAESSEQGRLIKLSIRFGIRMPGYLLLSRTIWTVETVYIRPWTGKSAEMYSGAGEYGQSGQVYVAENGSVYHRDLSCTYLALSIHACSMSSVQHLRNQYGARYVQCERCGHVSDKNQTVFITDMGTAWHTDRHCSGLKRTMDGMSQKEAEQSGLRPCSRCGASGGGDAMLSACMILLLYPLIADIRKSRFYIGPVLICTLILMGIGIVRGKIILFSVLTGWIPGMMMVMMSRWTNGKIGEGDGIVVAAMGMLIGWYEILLLFSQACFLSAGYGLWLMVVRKSGKNRAFPFIPFLFMAVLFFSFFGQMTVEASLLMPMVIFILAGLCYSFFFMHDYIVMQNEGYRRTEAELWHRETEEDMPVFMMSVLLDGSGKSILQQAADWVNHQSRAHLVLQGELKIPVPGIQSWTGGVLKTRQEADAIRVDYTRDRVLAALKREQMEIAYSGDAFHTYMVISSEEWGENEDEEKMMSNQSAQVLLPFQVQRLNDRKNYCYDISGRMEFRSYIERKQADRSMIKSVIRFIAGLDQAVEEYLLMPDGLLLQPECMYLEMPEENLRAAYIPGRKEDFSKQLKELTAWLLENTYHEDREGVLLAYELYKSVQQENFLPGRLKELLREEKRENVQGELDMETNKTFVEEASDKGQQREEVDADSKEPASKKLIQGKKAIAWKILSGIVVGAAVVSYICGWTGKLLQTAGMTVSAEWVTAVFILGAGISVLYRLLSRRTGPKEVNVEKRDPDHHDLFEGGGVYAFTDETGDDIWNTDENKTMLLSRSENQIRLLSLDKKTAPDLVLDRFPCMVGSLQAEDVYVIPVRGISRKHARIEKTEKGIYLMDLNSTNGTRINGEELKKNEKRRLMAEDIIEFAGVRYMFCMRKRHLLKKAGTSLIAAALMLSCTASAYAQEKESGAAEDALEASDVIDITKKGSIAIYKYDMTSAEAAGVYTEGSHQATGEADPALQEIMSPYAVEGVEFSYLRCGDIETYSYNGGAAVKLVYEIPEELRRILGLKEADAVSMSDEKVSSQCLHTGVWHYTSQQLNDALKNGLENENIKTKSALENYLSTSEKSEKMTLTDQFGYTYADKLQTGLYLIAETKVPEQVTATCNPWLVSLPFTNEGGDWNDEKGGEKWLYDAVCYPKNQTGNPTLDKLVRQSPDCGGDGGYDSTETVSEGDVLDYLLVSKIPHITSQATWLKMYTFKDTLSKGLTYNKDVKIALYSHEEDAINNKTEKAEAIWTTNEFTQSALKDEKSGQTVLTISMTDKGLEKMNHSEQGFSDYYMVVYYTAKVNSDNTTVLGDDGNENDAVLTWKRTSEKYFNTLEDRCVVYAFGLNLNKTFSDGKGNAAKAAFTLFNKDNQVYVVAEEAAGGTYYVTGKTNKKEQATIFRPAESGKLLINGIEGDNYQLTECSTDNGYSILKEGIMITINSTTETIIPSVAGTTGLEAATDAGQAINKNYNGGIVDAEGVNVSESKGVQRLENANGRTIGKTDMYEGDKISASASVDGIDSAMSDADGSVNARVNLNILNSKTFLLPQTGGTGLYAATIIGAIAIGLGFVLTRKKRQQAMGRKNRKRFEWVPYLCIAAGLLCMLYPYCSEYIFQNRTASVISTYERTSMALEESQHQEMLEQAQRYNEYLAGSQEKLTDPFQTKKGEANDLMYDQLLSTGGSDVMAYIEIPKINVVLPIYHGTSSQVLSKGVGHLEGTSLPVGGQDTHTVLTGHTGLDQARLLSDLNEIEEGDVFCIYVLGTCLKYQVFDVETVLPDDTDGLQIIKGEDRATLVTCTPYGINTHRLLVHGRRMEEGFADVEAPSEKIEHSRDSQWQKRYQYAVLIGGLLIIGIILLFSQDILKIAGICLMISGTFLFISPELMQTAQKVKMQIVIQTYEKSEETQKQHQEESALYQKMVTYNQTIYREQQKGLDNLGEDGAMENFKNEMIGVLEIPALNQDFPIYAGATSEHMSEGVAVMKDTSLPVGGEDTNCVIAGHRGYNRSKTFFKDIECLSAGNRIYIKNSWEELVYEVEKIDIVTPNDVDAVKIRPGKDMVTLLTCHPYGSNGKYRYLVYCSRVKDAGKDDRKKEVSYAYKDHIVASDGQIYSLSSKDIQKEKYFRWLCAIILFLIMAAMKIKDMWRKRRQTMRRKKRTGILTFLVFLIFVFSMVVWASDGIEGERMDTEDTETERVIRESEDRESQIQEESEGIAGETFTENDVETETGIEDSYVYDGEVFSEVNEYSARAVTKGKIDYTYWAIHQGAGFGNILEDGRDLDHVGCIMLKVGNTWKTAYCVHHNADLKGGHEYADTASYLTDSNKKRLTGLALYYGFRFSGWNPDKKTVPGDSDKGKYTATQVMIWMIERGWYTYDANTYAFQLNTKAINAAKKICDKSDQSPVGSSYDYFKTIYSKMQTFGTVPSFAYRSENSAQVRNMGYDFQTNQYVLKLTDTNNVLSMYDVSEVPNGVTAQKTGNTLNLYSSVPITSAGVIKLSKKSFKAEKAVTVWSDQTISGYQQIGTYKEPETADLNTYLKITAQSVTMTAEKVWNDSDNIYGKRPSELMVDLYRGQSKGDKAVLVKTVILNAENEWQFTVSDLPQKDSAGGHIYYMFTEREAAGYTAETTESTAGTRHWKFTFTNTLNSGHLQLLKKSSDEALTGGNPCYTLLNAEYGVYTDRNCTNSVGNLITGESGWSNTLTSLAAGTYYVKERKKPSGYRTDDAVHEVMINEGETTVITLTDEPIISWGQFRIEKSALDGASVSDTIPLTGAEFTIDYYRETGVTKENISDKVPLKTWVVAVKKTFDGQNTSYKAELEDTYLIAEKSDELFRDRMGKAVLPLGTIAIRETKAAEGYLLQGYVDDVDGRRLNNYPGESVIINLADDGERASFLGEDGLKYSNPVFRVTNELHKCSIQIMKSSADGKPLENVIFGLYDESRQKILESQTSQDGRIIFSGLLPGKYWLKEEKTGNGQQLLKEPMEIVLPMVLTEQDVEKLKIDKSQLVYDENQQVFKLYDRIFEISNAGNLVLPMTGGDGLVLPDILFLAAALLLIGVCLFVYRKGKTTARMQQYDRGYRRNALWQMSPVNTLIIVINVLVFAGLSFLGDTTDVRFMYNHGASFWPAIIEEHEYYRLLTCTFIHFGISHLLNNMLVLAYIGDNLERALGKIKYLIVYLAAGVGSSAVSAVWSMMKDEYSVSGGASGAIFGVVGALLVIVIRNRGQLEDLNSHQLMLFAGFSIYHGVMSAGIDNMAHISGFVIGALLGGLLYRRKRYRKQNTKRAAGTWMPVESVTDQPVWQADWEQCEDIRQYAVRAERAKRMYKAHMIDRDCIFCKIAGGDIPSSTVYEDEQFRVLLDLSPATKGHALILPKQHYANIFEIDENILRDLIVLAKKVASAMKETLNCDGVNIVQNNGEAAGQTVFHFHMHIIPRYKDDGQVIGWEPHTSDPEVQAQLAEKIGQAIHMKKIVLTGGGTAGHVTPNIALMPELKKRGYDISYIGSYEGMEKGMIMETKTPYYGIATGKLRRYFDLKNFTDPFRIIKGYFEARSRLKKIHPDVVFSKGGFVAVPVVRAAHALKIPVIIHESDMTPGLANKLCIPVASKVCCNFPETLKYLPSDKAVLSGSPIRSELFEGDRSRGLHFCGLTSDKPVILIMGGSLGAVAVNEAVRAVLPELLKDFQVIHLCGKGKTDKSLNNVTGYVQYEFIKEELRDLLAAADLIISRAGANAICEILALRKPNILIPLPAAASRGDQILNAESFQKQGFSYLLPEEEITNEKFLDTIHQVYSDRENYQKQMASSQQNQAIPIIADLIDQLASVMKYATSRTCSREIDFEVDNNNIVTSCEFIGGCMGNTQGVARLVVGRSVDDVIKTLEGINCGNRGTSCPDQLAQALKAYKASHQAMLGIIGAMDQEVNILKEKMEVKKIDKRASMEFYVGILNGKDVVIVKCGVGKVNAAVCTQILADCYQVEAVINTGVAGSLRAEINIGDIVVSTDALQHDMDATGFGYEPAEIPLMGKKTFEADASLRSLIAETCREVNPEIGVFEGRVVSGDQFISDGDVKDRLVRMFAPYCTEMEGAAIAQAAWLNQIPFVIIRAISDKADGSAHMDYSEFEAKAIEHTVRLVEAAAAKLAMKEWIVLQGWPLYLMLGMTGLGLLGSILSRIFYGRLAREAQLCGTSDYPMLHYIRQKYSSYYKLGMRPGNAEALVKRYLALHRVGPLALYSWNEAGNFMMGAVMLTGLIRGIYRFQTTMQTGPALMDIGIGLVLALGLRLTGKIFSVERLQVITLNAICDYLENYLKSKLDGEYGYGPQTETPDHYARALKETAASRTKPGLRPTTVRRMPAERSETVDSTVDAKIVEDVLKEFLCMANKVTFDYSKTAEYISEGEITAMKRIAEDAKKLLLSREGEGNDFLGWIDLPVDYDKEEFARIQKAAAKIQSDSDVLLVIGIGGSYLGARAANEFLGHNFYNIIPKSMRKTPEIYYCGNNLSSAYIKGLMDVIGDRDFSINMISKSGTTTEPAVAFRVFKKMLEEKYGKEEAAKRIYCTTDKARGALKSLATEEGYESFIVPDDVGGRFSVLTAVGLLPIAVSGADIEQLMAGAASMRKVCLENAFEENDALQYAAVRNILLRKGKSIEITASYEPSVQYIGEWWKQLYGESEGKDKKGIFPASVTLTADLHSMGQFIQDGSRLMFETVLSVEDPGAEIILEKEDVDLDGLNYLAGKSVDFINKSAMNGTILAHTDGQVPNLMVKIPAQNEFYLGELFYFYEFACGVSGYILGVNPFNQPGVESYKKNMFALLGKPGYEDMTEALLKRLMKKLLKNGTIVLEDKVIQGDLLIEDEVIAEIGQNLDAEGGQIIDATGLVVLPGGIDVHTHFNIDVGVRAVDDFSTGTIAAAFGGTTTIVDHMGFGPKGCNLHHQLGVYKGYTNGKCVTDYGIHGVFQDINEDILKETEVMMADGVSSFKMYLTYDYKLEDADTLKVLKKLKDIGGITTVHCENDAIIHYLRDKFVAEGKTEAKYHPQSRPPYCEAEAVDRMIALAKAAGKAPLYIVHVSAKESVNLIREARKAGDTVFGETCPQYLVLDESRYDDPVEGLKFILSPPLRAKEHQEAIWQGIKDGTLQVIATDHCSFDFHGDKQNGKDDFTKCPNGAPGVETRMPIVFSEGVSKGRLSLNEFAAVTSTNPAKIFGMYPKKGVLAPGSDADIVLMNPDMEVTITKNILHENVDYTPYEGIQVKGWPVMTMVRGQAVVENERLQVPLGFGRYINRKPVKYTELLKMAEKKEKIIYISGHRNPDTDSICSAMALADLKNKISARQVADEHADRVVYKAVRAGHLNQETRYVMKAFDVTAPTYMRDARTQIKDIFDDKTQSVSGNISLRQAWKTMRAVKKATLAITDSKGHLEGLISTGDIAKSYMAVFDNCILAQAHTPYVNIIDTVEGELLAGDAKQCVTSGKVVISTANTEIIKDHIDAGDVVILGNRYEAQLCALEQHASVIIVCDGAPVSRTIRKIAGDNGCAVISTAYDTYAVARLINQSLPVSYFMTKENLVVFKENSYVDDIKDIMMKERIRDFPVVTEDDCYAGMISRRNLIDMNKKKFILVDHNEADQAINGIEETEIVEIIDHHKLGTIETIKPVNVRNQPVGCTATIIYQMYIENDIEISKTVAGLLCSAIISDTLLFRSPTCTPLDELAAEKLAEIAGLDMEAHAVAMFDAGSDLKSKTNEEILYQDFKKFKSGDTTFGVGQVTSMNAEELKKLKDKMKPFLESARTKENIDMLFLLLTDILSENSYVIYAGAGAENILSQGFNQMPVDGEALLEGVVSRKKQFVPVMMGMLMAMSNEKEIFVIGHKNPDTDSICSAIAYAYFKNQISKSNCYKAKRAGEVNSETQYVLDKFGVKAPEYVDNVRNQVKDSGLKEAERVSKDMSVKKAWELLSSKRESTLTVVNDNGGLEGLMTIGDIAKSIMDVSGGRALADAKTSYKNIVETLKAEVLAGNIDHKTATGKVIVAAANPDLMEESIEAGDMVIMGDRYESQLCAIEMQAACLIISIGCEVSPAIIQLAEEKNCIILRTAYDTFITARLLNQSIPIGYFMIKNNLTYFRTDDYTEEIRSIMAKMRYRDYPVLDSEGRLVGMMTRHSLLEMDKKKVILVDHNESGQAVDGLHEAEIEEIIDHHKLGFVETIRPIMFRNQPVGCTATIIYMMFKEKKMAIPEKIAGLMCSAIISDTLLYRSPTCTAIDKIAAEELAAIAGIETEAHAKAMFAAGSNLSKKTTEEIFYQDFKKFKSGDISYGIGQISSMDHDELTAIVDRLTEFMEKVRPETGLNMLFFMLTDILQESTTLICVGPDALTGVASYSGCPVQGNTVIMEGVVSRKKQVVPTLMQAFQSMSKQLWKPGNMLYPLPAVLVSCGDKAGNYNVLTVAWTGTICSDPAMVYVSVRKNRYSHHMLEETGEFYINLTTEALAFATDYCGVKSGKDLNKFEEMHLTPEMGMLSWAPMIKESPVCIACEVVRIEELGSHDMFIANVKGVYADEAYMDEKGKFDLIKAKPIVYSHGQYYGLGRYIGKFGYSVQKNPAKVKKASVHKTKAKNKKAMIDYRRKTVIKGQKELRCGYTTGTCAAAAAKAAAVTLLSGEICRDVSLQLPGGEHIILETEFLECSENCVKCGMIKDAGDDPDITNGLLICAAVEKTEGKTILIDGGMGVGRVTKPGLDQPVGAAAINSVPRKMIHEAVEDVRRQYAWEKGLKVTVFIPNGKKKAEKTLNPMLGIVGGLSVLGTTGIVEPMSEKALIDTIAVDIRMHRAQNEDILLMAPGNYGMDYLKAAYHIHPDQVIKISNFIGDSIDLAVCEGASGIVLAGHIGKLIKVAGGIMNTHSHQADARMEIMTAYAAMAGAGNDILRQIMSSVTTDAGMEILLQCGLLTETMQLILEKIEAHVKKRAGSQIEIGIIIFSNVFGMLGQTENVPNLFKKMNAAQHKEEMVSGCLYSVGVGPGDPELMTLKAVKIIRNCQVLVLPAENKEKCVAYQIVRRAIPEIEDKTTVCLVMPMTKDKDRLEKSHREGTQKVAEVLDAGKDAAFLTLGDPTVYATSMYIHQRIAGMGYRTSIVSGVPSFCAAAAKLGVSLGEKQEQIHIIPASYDVEAAIQLPGTKILMKAGKKMPVVRQCVKEHHGWAAMVENCGMAEEHLWINAEDMPEHPGYYTLVIVKDRKDEEEMIHFVGAGPGAPDLITIRGQKLLAKADVIIYAGSLVNPALLEVKKPECAVYNSAHMTLEEVLDVMKKAEQSGKTTVRLHTGDPSLYGAIREQMDALKKMNIAYDICPGVSAFCGTASALELEYTLPGVSQTVIISRTAGRTPVPERESIPQLARHQATMVLFLSTGHLPKLQKELLEGGYTAATPAAICYKATWPEEKRFFCTVGTLAETAERENITSTALIVVGNIIGEQYDRSLLYDPSFTTAFREATETTNGSDTDKAGMDQMKTAVISFTQNGNACNRRIITGLKMAGYTTEGFYGGRYKENDSLAKEILRPAAKKVAEWTKDAFEKYDAIVFVGAAAIAVRSIAPCLKDKLTDPAVLVVDEKSQYVIPILSGHVGGANALAVQLAAYLQAIPVITTATDIQGLFAVDVFAVKNHLLITDRRKAKEISASILEYEQKLVYADAMLTHEAVLPKYLSITDEVEKADIIIDYHRLSGNMKGLQLIPEKTVWIGIGCRKGTETDIIKAAIRYFLTEHAIDERSVAGIASIDVKAQEQGILDACREYNWPFITFSAEKLCALEGDFTASEFVKSHVGVDNVCERSALCAAGENEENGIIGHGETILLIRKEIMPGITLAAAGTGRRLRFEMSKLYVVGIGPGGYEQMTVKAVKVLEECDIIVGYTVYVDLVAEHFAGKEMLTTPMRQEEKRCRMAFDEVMKGRNTAMICSGDAGVYGMSGLIYEISRDYPGIEIEIVSGVTAALSGGAVLGAPLMHDFAVISLSDLMTPWTLIEKRLAAAASADMAICLYNPSSKKRRDYLNKACRIVMQSALPETVCGIVKQIGREGESCQVMTLQELSNYEADMFTTVFIGNSTTKVINGKMVTPRGYKLSEMYTTESYTTSIAVSDYKKRYIDIPTFTEYCKACPNYDRLWSCPSYTFDVEAFWNQFQTLDLFAVKILYNDDYAGKQFSEHKIADIMRQSLNVEKARISRELFRLEEKYPGSVSLSAGSCSLCHDNCTRPDGLPCRYPDKLRYSIESLGGNVGLTLSQCMGIDLEWMEEGRLPHYFVLVSGLLRRMEKSKVFFTDFRTPAYGDGLTIKLQKLLKKAGIEQLDMDGKFVAIKMHFGELGNLSFLRPNYARAVADLVKSLGGKPFLTDCNTMYPGSRKNALEHMECAWQNGFTPLTVGCPIIIADGLKGTDDIDVPVEGGEYVKAAKIGRAVMDADVFISLTHFKGHETTGFGGTIKNIGMGCGSRAGKTEQHSNGIPTISSRKCVGCKRCQKECANGGLVFDAETKKMTVDTEHCVGCSRCLGACNFDAITFRNSNANAILNCKMAEYTKAVIDGRPNFHISLVLDVSPNCDCHGENDVPILPNIGMFASFDPLALEQACVDACLKAEPMPNSQLSDNMSRPDFVDHHDHFTNSTPESEWQSCLEHADKIGLGSRDYELIVCMSRNATKDLTTGSPMKLILGFGIPLLFGMLFQQFYNMMDTIIVGKFLGVSALASVGATGSINFMIIGFCMGVCNGFAIPVAQRFGAKDEHGMRKFVANSVWLSIIFAVVMAVLVCVFCRQILELMNTPEDIIDGSYSYIFVIFLGIPATYMYNLLSGIMRSLGDSKTPLYLLIFSSILNIILDLLSIIVLKMGVAGAAWATVIAQAVSGFCCLGVIWKKFPILHVQREEWQPDKLCILNLCNMGIPMGLQYSITAIGSVIIQAAVNSLGSVAVASVAAAVKINMFLCCPYDAMGSTMATYAGQNVGAGKFDRLKQGEKSCTLLGLVYGIAAFIFILLFGKYLALLFVDASEEVIINQAHLFLMCNSAFYFPLALVNIFRFTIQGMGFSRLAILAGVCEMIGRTVVAFVFVPIFGYPAVCFASPVAWILADCFLVPAFFFCVRSLEKRAALEDRQAVLEDKQEDKNMKKILMIATGGTIASKGTADGLAPELTSQDILHYIPSLKDICEVETLQLCNLDSTNISMEHWMMMTNAIEEKYEKYDGFVICHGTDTMAYTASALSYLVQHSPKPIVLTGSQKPVDMEITDARANLLDSFIYASSDDACGVQIVFSGKVILGTRARKVRTKSFQAFTSINYPSLAVIQDGRKIQYIHQVKAATAEFYHKMDPKVGLLKLIPGIDGDYLRYFLERNDAIIIESFGVGGLPMGERYHFGEAIEWGINQGKTIVMTTQVPNEGSDMTIYQVGHHLKQYDSVLEAYDMTTEAVVTKLMWILGQTREPAGIRRLFYTTVAQDILYNESRMDLRLIALDLDGTTLNSQGKVSPYTKEILEKALSKGILVVIASGRALSAIPEDILNIRGLKYIITSNGSSIFELPDSRRIYANDMKPGVVMSVLAIMQDTHFPFEVFIGGHAYTMQAYYDCPTDFGVPERMNHYVQTTRTPISDMPDFMMKHCNEIEGIDMIVPDMPKKQQLITALSQISNLYITSSESYYIEMASGSVSKASALHALAAQFHITPKQVMAFGDSDNDIELLSYAGCGVAMQNATSNLLKAASAVTRSNNEDGVAFYLESFLMEEKIKDVLDAYTFQTTRVCRGRGAFICDTDQGMKIVKAYHRSPQRLEFEQLVKYTIRDRGYYYVDQLLPNKEGQYLNSNKDGQMYTVRDWFEGRECDVKNAADVLAAVRQLAVLHMLMRRCDLSEDRVEQFSFQDTRQIFLKRRKELRAIYSYIRQKKQWNDFEKLYMQLYGDCMKEADAALSELNQFDFDGLRKKALDERTLCHGDFNYHQVILNRKYTAVVNFDKMHYDIQVKDLYQFLRKVLEKNNWDSSLGTMIMDTYLSVRTLSEEERRVLYAMLTFPEKFWKISNRYYNSRKSWISSVNYDKLCRFKKTEGQRQDFLNTFKYAFIFMEYKEVYESWLANPYFDEATKQELLSIKDDENEIKERFYADLEFGTAGLRGVIGAGTNRMNVYVVRKTTQGLANYIIKQNAADKGVAIAFDSRRMSTEFANEAALCLAANGIKAYIFDALRPTPELSFAVRYLGCTAGINITASHNPPEYNGYKVYWADGAQITPPHDSGIMAEVKAVTDYNEVKTMDRDQAIAAGLYQVIGSDVDDVYIAQLKKQVKNPELIKEYADQIKIVYTPLHGTGNIPARRIMKEIGFENVYVVPEQELPDGEFPTVSYPNPESDEAFVLGLELAKKVDADLVLATDPDADRLGVRVKDREGIYHTLTGNMSGCLLADYTISQIKEKQGLPKDGALIKTIVTTNMADAIAKYYNVNLIECLTGFKYIGQQILKFETTGVGTYLFGFEESYGCLIGTHARDKDAIVATMALCEAAAYYKSKGMNLWDAMVDMYERYGYYKDDIKSISLSGIEGLAKIQSILEALRQNPPAEIGGYKVVSRRDYKKDEIVDLATGETKPTGLPSSNVLYYDMTDDAWLCVRPSGTEPKIKFYYGIKGTSLADADEKSEALGKAVLAMIDKMMMKFKYSLPCLLLLVVMLTGCGRNFDSSGYVTSIMDTLYKGNYTSYMDFTGVSRSDVSLYRDQWLTSSAEAFMTAFGAGTPSEETTDRIIALLNQLYANASYEVTAETPASDGSPQTVQLSIRPLNILKDNYDAIQVYVHSFNEKNADFSYADLTEEAYYDTYLDGILTILESHLADMTFGEATTLDITLEKNSDGLYTISEDTLTAIQNTLLPWPETDTQQMAGKVWKISICMMLTVLLCACTENDMMEKKVRDLDFTVVSAEDISEELKSHIDERKEETFTLIYRDGENMYLIVGYGSQEGGGYSIRVNDLYLGEQSVCVSTSLEGPGSGKNTESEIGAGTVSYPYIVIKLETLDAPVIFDIMQQKDIMNVRRAVDANIGRRVRVRANKGRHKYSVAEGVIQESYPSIFTVRINADEDNAERVVSYSYTDVLTRDVQLVICKMLTDTQMLQAMHFRSSVALQVTLDQDYNVPDNKSDIEKVIVENGEIQIQNIKTMPDKMILKGSLFWRMAYLKDRQNCTLDHMEGELPFEEVVNMDGLTEEARIRVDCEMEDLRVTMIHSRKVSVRSVVNVKVHASAVEEIPVVSEISDTEKHLCLQRRTLDVSGIAVRKKDTIRIREEMTLPGNKANMLELIWGEVQNRRVDIRPQDDKLLLRGEASVFCLYSGENEENPFEYAEADLPWQAELPCSGMREDMIVNSHLHKIAQSLEMKADMDGEMRLVMAEMVLEIDLEAYEEKKLQTVSDVYSLKRQLVPVYQEAAMRRVCIRNQTECKLYEKVRMPGEHAGVLQLCHPWAEIRMDRLELTEEGIRAEGVADVHILYVNEDDHLPLDIAGVMIPFACMIETGVLPKDVCFEVQPYLDQISAVMAGGDTAEVKMTVRLDTLVCQYMTIHVMTEISEGEANDGYMESLPNMTGYVVKKGDTLFSLGKQFCTTAQEIRRLNHIEKEEISEGERLLIMKQMSFMDTIRLKARAKINLGLDVVRRREDGYHEVRMVMQMLKLYDQIDIEKTETPGIRLTCNLSFLPTDERNIAYKAAKVMMEQFDIKQGVCIHIEKHIPVAAGMAGGSTDCAAVLYGMNKLFDLQLSQKKLREIGVKLGADVPYCLMRRTALSEGIGEILTPVAPLPDCPILIAKPSISVSTRYVYEHLKLNEETLHPDVDGIVSALKAKDLYGVTDRLGNVLETVTIPEHPVIADIKQQMMQSGAVNALMSGSGPTVFGIFDDEDKAKKAFEDMKASGLARQIYLTRPFNQKIKSTRKNQRKRMKDFEMTIDEYLPLRDVVFNTLRRAILKGELEPGERLMEIALANKLGVSRTPIREAIRKLELEGLVVMIPRKGAEVARITEKDLRDVLEVRTSLEKLAIELACDRITEDDIHDLKLACKDFEESFGKDDLTTIAEKDVAFHDIIFRSTKNARLIQILNNLREQMYRYRLEYLKDTQSHDRLVEEHQRIVDAIIDKNKEEAVRLIQEHIYIQELTVIKKLQEQEAMHNKIETELETNIRYIESRFEGCADAVMRRILVGDEKLGMYVVYMDSMYDRDFIDGVVLKSLLFDRIQLPDQNAGQVIFNKYLATADVKETNRMEMLIDEVLKGNTAILIDGMAKAMIVSSKNLPGRGVSEAETEVSVRGSKESFTESFRVNTVLIRRRIRDTRLKSRQMTIGVRSKTDVALMYMEDLVRPEMLKQVIRKLESFKIDAILDSSYLESLTEEKWYSPFPQYQSTERPDKAASALLEGRMVLVVDNSPMVLLLPTVFACFFQASDDYYDRWDAANFVRILRYAAAFFAVLLPGMYIALAGFHPEALPLSFALSFAASREGVPFTLPVEVVVMELAFELLREAGIRLPGPMGSTLGIVGGLIIGQAAVDAHIVSPVVVILVALTALSAFTIPNDLFASAFRMIKFYFIAAASIGGFVGLTAAVLTVLTHLSGLKSFGIPYMLPFVSAEMAPEGKWQDNIWRMPLGKMYERPYFTRKGHRRRLRKERKNDIRMISDNQMISGRQASWIFMLDMLAAGLFSLTAAKEQASSLTMLVGSLLTIGLVLIYYKASFCMFDQYEKKTGIRLSEQKLPGILCLLWLIFYLAGLIWALRFYCAVIADRIPVAYGRVLPIIFLMAALIYGAGKGMEVRGRMSELMGWLICLPLILLFIFGLQQVIQSGCWRYLMVESVKQEGGISLLLMLKNGLAGAAFFLLSDQPLLLWRCIQRQNRRKGIYPVAFAGAGLMLLFSTGLTVCLLSPEGIAGERYPFGVVLQLIRFPGNFISRYDIFFVMLWMMSFFVFAGGMLIHLTVAAKGLIRTENKDAKMDRKLALLFGILITAGLLCGCYAEREPQNRNYIMCMGIDSDPEGGLKISYGFPDLSALTGTDAGEAEPMRVIAAASVSEASELLNASSDKTTDYSQMPVILMGKDLFEDQEKRSQVMNELADEKTIRRTALIARAEHTAEDILQLDDDVHGSVGVFIYELCQNNYENKGCTMSILENFIGGRAGDETVIPVFENNSGVPEIIELISYKMTENVILTVRGHQTDLGEDATTELIAGAAYYYRNGKHYILYDEIDPESGEQSGNTIKIGEDRVDVIRRGAGKVHMVFEKEKQISSQYHTPAGVIQMEIFTSRLRTRQEGENIETEIVYDLHMNDVFISECRVVIRVASKEKAELHIIMKQNGAVYFYNLNSERGRQIRMLCLTLGLKIRVVDRAQYTEAIGAIAGVPGYSLSGETYKGEGFEDEMLILKGFTGGMLDSFLHGFRKMKIQPVALKAVLTEANCGWNSLELHDELVKEHESMHSQTPSEVTDNKETEMSDHLIIALNREYGSGGKEIAEKLGKRLGLEVYDEDIADLAARRSGIRKDYFEKVDEKPTDSFLYMLAMNTFTMNTSMNPFENTLSSDKLFNKQAEVIQEIADKDDCIIVGRCAGYILRDEPKCVRIYISADKDFRTKRIMASDHLDEKEAQKKIHSMDKKRDSYFGYYAGQDWKACHTYDLSISTSSLGIDKAVDLICQYIDIKFKMLVSAKEMLQKAKAGHYAVGQFNINNLEWTKSILLTAQEMDSPVILGVSEGAGKYMCGFKTVSAMVKAMIEELNITVPVALHLDHGTYEGCYKCIEAGFSSIMFDGSSYPIDENVAKTKELVKICAEKGMSLEAEVGSIGGEEDGVVGMGECADPDECKAIADLGVDMLAAGIGNIHGKYPANWPGLSFETLAAVQEKTGEMPLVLHGGTGIPDDMIKKAINLGVAKINVNTECQLSFAAATRKYIEEGKDLQGKGYDPRKLLAPGAEAIKATVREKIELFGSAGKASEMRRKTGLLFFIYASNEPKSVLARDLGDRRDNLRNSWSVFLIVVLTATVIITCAGCLGGQQKYNGHSVLGGFSKVSQKAFSKVLFHPDLQQKPMIALTFDDGPKAGVTDWLLDELEKRNVKVTFFLIGSQADLPENRETIRRMAEDGHQIGCHTYHHVQMTTLSENQQKQEILQWYQAVSSIIGDFSYAVRPPYGCVNNAVCRSLNVPVILWSVDTEDWTGKSAGEIADYVISEAKDGDIILLHDIFEESVQGAVMALDDLMRRGYTFVTVNDLLADRGIAIQSGKVYRQAAQGGKMKIGSHVGMSGKEMFLGSVKEALSYGADTLMVYTGAPQNTRRKAIEELRVEEGWNLMKEKGMDEIVIHAPYIINLANTVKLETYELAVEFLAKEIERTAAMGSKVLILHPGAHVGAGEEAGIRRIIEGLNTVLTADTPVNIALETMAGKGSEIGRNFQELAAIYEGVRYNDKLRVCFDTCHVHDAGYDIVHDFSGVMSQFDKVIGQDQIAVFHVNDSKNPCGAHKDRHENFGFGEIGFEALMQVVNCPDFEQIPKILETPYIPDAENKKKSYAPYKFEIEMIRKGLFDAQLKEKILQAAKMLDASDEGENFMERLSMRIPENAAVILKGLSEAGYEVYVVGGCVRDSLLGREPKDWDITTSARPEQVKAVFAHTIDTGIEHGTVTVMIGKEGYEVTTYRIDGEYEDSRHPKEVQFTSQLLEDLKRRDFTINAMAYNPDRGIVDAFDGIGDLERKIIRCVGVPQERFDEDALRIMRAVRFSAQLGFEIDGPTKEAITEKVQQLENISAERIQMELVKILVSDHPEYMRLACDLGITAVVLPEYDRIRGVSQHTPNHIYDVEEHTLRAMMNIVPDKVLRLTMLMHDFGKPDVKKVVEGGREIFYKHPEVSAAYAEKIMRRLKFDNDTRTKVVRLVKWHGLKYDASEVSVRRALNRVGQDIFEDFIKVQHADIEAKNPAVIPGKLALLAEKEKTYHKVIAEGQCFTVRQLAIGGLDLIRAGIEPGPLLGAVLDKLTEAVIDDQRMNNKEKLLELAEKLKDDPAVFTPKEDFFMMTIAPIAALGTAWIVTLVILAILIVALVIVGVWGNKQQKKSADAQQQLQDAAQPMTLLVIDKKRMKISEANLPKVVIDNVPKMMRRSKVPIVKAKVGPRIMTFMCDEKVFDMIPVKQEIRAMVGGIYILSVKSLRGPALVTPPKKTFWQKVKGKFSKAEMIRTILVLLFLLCFFIISIPLYLIEAIIGHFDIHKKERSSFVIVTTALKIIIWLSGIHLIVKGQEKVPKDQAVLYVSNHRSYFDIVTLYPLTNNTTGFVAKKELERIPFIRRWMRYMNCQFLDRENIKEGLKTILNCIATVKGGCSVCIFPEGTRTPGDDMLEFKEGSFKIAEKSGCLIIPIAITNTENVFENHIPFIKASTVIIEFGDPIDLNAMPKEERRHIGSQVQGIIGGMLKENSLANVESMNVQEIKKTPRPRYCGILVHPTSFPSPYGIGDLGDGAYAFIDFLYDAGQTLWQCLPLGPTGFGDSPYQAFSAFAGQPLLISPDLLLKDGLLEKDDLADVPDFNDYSVEYGNVITYKTALLRKACAHFTASEDKALHKAFNHFCRTEKDWLEDYALFMSLKDLHQGRSWHEWSPQYQVLDTRTRKATLTELADSITYYQFIQFIFFKQWHELKLYANKKGISVIGDIPIFVSPDSADVWANQSLFKLDSKGFPTAVAGVPPDYFSKTGQLWGNPLYNWTEHKKTGYAWWISRIRQQLQLVDYLRIDHFRGFEAYWSVPYGDETAINGKWIKGPGASLFRAIEKELGKDLPIFAEDLGVITPQVEKLRDTFHFPGMKVLQFAFNDTAESDFLPYLYPENCICYTGTHDNDTTVGWYLELDEKYRDKVRRYMNCDGSNIHWDFIRTALGSTARYAIFPLQDLFGFGSDCRMNTPGAAAGNWAWRYTSDRLSPELAEALKTISEVYGRDRARMEVHAMAYNYQRNCPPCGGRPPYRDPWGPPPPGAGRPPYQGPWGPPPPGAGRPPYQRPWGPPPPGAGRPPHQGPWGPPPGPGRPPYRGSWGTAGKNNRLQSQSCAQEEEQEADDLYMTDMPEPGQMEEDWLYMQQLYPNTARKLVYYIEDAADRLEYENSMMFDNYPDRIAVEQVVKEIIAVIQENDPALITMPEDTAVSERKGDQTWDSCMEEMIQIMLLGEMHHRRWRYQQLNRRNYMNQIEELLKRVLTSLLVDMVISGARGGGDFIKIKVRPVMIRDSLYFQVSRYTDKQVFHENMTAEDALETLSGWILHDFRQAQIRMQDEMVTVLVSKKGKATVKSKKVACIETQNLEHNRKKRYIIEEGTAVPFMIDLGVMTESGKIIRTRYDKYRQINRFLEFIEDILPELPTDRTVHIIDFGCGKSYLTFAMYYYLKVLKHYDIRITGLDLKQKVIEDCQALADRYGYDGLQFLCGDIADYNGTDEVDMVVTLHACDTATDYALYKAVKWHASVILSVPCCQHELNRKMQCETLSGAFQYGLIKERTAALMTDAMRGQLLEMKGYKTQLLEFIDMEHTPKNILIRGVKSKGLLPKAARKQQMENYQKCRDFFGAELTLEKLFKEMEGEMAYEQNMSRTKKILLTLLAYLTAFIAAVCVSSFVLNQGKVSGEQQRSSADLPLLYVRTGGELMNEMHGYTEPVDGGYYRDTLTPVGESKTINLSMDTYGHNISSVSFELYNDQYTDLIESGDCTDMEKVNAMVQMQLQFKNTLYSNREYCLHLMLKNDQDQVYHYYTRVRYGSDLKVAEKLKFVLDFNETTFNKDSADALSSYLESTSSSSSSDKSLVTLYSSSDTVTWGSMAPYRTSEIAIRLKEINTETAAFTLSYTIESSAGDINTFYNVNEYYRLRWTDSKVYLLDFERRMAENIGLADITVSSGALRLGIGDASDIDYASYGTDQQQYTWVTGDQQLWLYDNTNRIMTKVYTEEDDNHNCGRQDEAGIKVVHADPETGDLYFIVYGYMHSGNYEGREGVMVYHFSHEDVLLEDLVFIPFNKGFEQMRSGLEELAYMNDDGTLYLLLEDTVYAIDVNMGKMDVAYKDLNSSNCTASGDGIFVMCDGGDENAGERLKIVDLNSGKERTIEGGDWRIVPLGYAGKDLIYGLIDPQMLTEDSSGVIRTPISEVHIMDENYNEVKTYQKSGDYVMRLTISDGNISMKLAKAVKNGNYTDYQDAGEDYIIRNIENDDQKIYVDKQKDSIRGQQNWLHLNTSDSFVPISQSARYLDPGYDISRKYEDTDQVEMQYYVYTKGRLDAAFATIQEAVDYGTTYAGTIMTSHKQVIWQKAGRAYIWGLNIDSIDKTSSTQSMNSILIKTIADYEGWELNGTIDDAEPLFAAMTAVLPAETIDLSGLKLDDVLHFVYRDRVVAVKLSNNNYGLITAYDNDYVWIADPAKGEVYSMTQTAAEKLFEQNGKVYYSYMDMGEIKTIGVLTSGGDAPGMNAAIRAIVRTAIASGLNVKGIMRGYAGLLNEEIIDMDKQSVSEIMRRGGTILYTARCKEFMTEEGQQKAAEILKKHGIDGLIVIGGDGSFRGAQKLSALGINTIGIPGTIDLDIACTDYTIGFDTAVNTAVEAIDKIKDTSMSHERCSIIEVMGRNAGYIALWCEIANGADGILIPEKEQFDEQDLIETILSNRLKGKKHHVVINAEGIGDSNRLAKRIETATGIETRATILGHIQRGGSPTAKDRVYASTMGAYAVDLLSGGATNRVIAYKAGQFTDFDIDEALAMKKTIDEYQFLISRLMVMYMAGFLTYYLFGMESCDMLSDNYIHEVIKKNNHAFLLGLQGNNLLSFNPHTLSKRGLSYRTASLTLRNQEYAAFFNNMLDTLSGMADQERDVCIAYMAGYLCFFAIDQSASPYILFRVWQDLPAKCSSSRMTCHRRKVETTIDTVLLRSRCHMEPSQLNFEALTFVSRKDLSAIAYLMRQTIQTTYKYRIAANEISTGVRNMQRQNIHLRPNNRFYHLLRYRIEGTLPILPAQKKKVYQDYLSDEHDYMNTDKKPWYTYPGCPEASYLSFEEIFEQALQNSHQLLENLDSCLAWGMDREELINSIIHLIPYPSIMDLFDYMREDKMEKESPLASRLRPRTLDEIVGQQHILGRDKMLYRAIKADKLSSIILYGPPGTGKTTIAKVIANTTSAAFTQINATVAGKKDMEQVVQEAKDRMGMYGKRTILFVDEIHRFNKGQQDYLLPFVEDGTLILIGATTENPYFEVNGALISRSVIFELKPLSAEDIGVLIRRAVYDTERGMGSYGAEISDDAVDFLADMSGGDARMALNAVELGVLTTEPSADGKIHITVDVASECIQRRVMRYDKNGDNHYDTISAFIKSMRGSDPDAAIYYLARMLYAGEEPAFIARRIMICASEDVGNADPQALQVAVAASQAVERLGMPEARITLAQAAAYVACAPKSNAAIMAIDEAMALVRSTQAAPVPPYLQDAHYGGAAKLGHGIGYKYAHDYPNHYVRQQYLPDAFKDQKFYHMGDLGYEKEMKEHMRRIRGDESDEEMKSKRLIVISLDALGSTDFEMFSQLPNFKKFIDHAAFCRQVRSVYPSLTYPAHTTIVTGRPPAEHGIVNNILIQPERSSPDWFWQRKYIQGTTLYDEALKKGMQVAAILWPVTAKSDITWNLPEIFANHRWSNQIMTSAANGTLGYQLTLNRKFGSLRDGIRQPALDNFVQASMNYTIRTYRPDMMFVHLTDLDTQRHHFGVHSKEAHAAIERHDRRVGELMHLLHRCGMSVKRDTTVVLLGDHSQLDVQNIILINRFLREQGYIRVQHGRITDWKAYCQNCDGSAYIYIRKNGLEKSEQIRIKNEIYDWLCAMKNDPDNGIAAIYSSKKAKELGADPECTFMLEARRGFYFQNELDMGEIPEVQRATHGFHPGRKDYQTVFMAVGPDIMPGVEIEEMSLMDEGPTMAEIMGLELPGAKGKVLREIFRMKLGSIKERECNDMIKNRIRLLPVLLLAVWVLAGCGHQVASADKASDGRLQVVTTLFPQYDFARQIGGDHADVSLVLLPGMESHMYDPTPGDMIRISEADMFIYTGAEMEPWAQELADSVDMSKVKVVDASSGVSMMKEEDEEHEHAEAEEDSAHAEEDSHDHSSHHHEHTYDPHIWLDMQNAIQMVKNIEDAFCEADPANAETYKANAEAYIEKLEALDSELKSITAGGNRRDVVFGGRFAYGYFIHGYGLEYESVYDSCSTDTEPSMAQMANVINYMKEHHVKYILYEELSTPNVARAIADATGAQMLMFSTCHNVTKDEFESGVTFIDLIQQNADTLKKALEMSILEVRDVSIIYSDDKRVAVEHASFKIEAGEYACIIGSNGSGKSTLVKGIVGLVPVTSGEVIHALSPEQYAYLSQITEIERDFPATVREVVLTGMQRSGRRFPFYTREDRKKAADAMETLDITDLADYRIGNLSGGQKQRVLLARALCREPKLLILDEPCAGLDPAITAEFYSLIDHINKKQGVTILMVSHDLDQVEQYASHIIMMNQTVEFDGDHEAWCRKCAQEGGHYHDTVNMTQLIEALSYPFVQRAIAAGVMISLCAALLGVILVLKQYSLIGHGLGDVGFASTSLAVALGLPVMAVSIPIVVIAACLIMFWSQRSKTGGDTAIGMVATGALSIGVIITAMSSGFNVDVNGYMFGSILAMSREDVIFSVVLSIVILVLFVVFYNRLFLITFDENFAKASGISVGFYQFLIALLTALTVVMGMRMMGSLLISSLIIFPAVIARKLVVSFKAVAVLSVFLSVICFLAGLILSFEMNLPTGASIVIINLIVLIAVTILNKLRGRMKILSFAVPCYNSEAYMRKCIDSLLPGGEDVEIIIVDDGSSDGTAAIADEYEAKYPGICRAIHQENAGHGGAVNTGITNARGMYFKVVDSDDWLDTDSYKIVLNRLKQFREDRKRVDMFICNYVYEHVEDGTSHTIGYHKVLPEEKIFGWDEARHFRMDQNLLMHSVIYRTKVLRESGLKLPKHTFYVDNLFVYIPLPYVKTLYYLDVDLYRYFIGRNDQSVNERVMISRIDQQIYVNKLMIDAYCLPQDVSNKHLARYMLSYLAMICCVTSIMLLISGTPENLEKRRELWQYFKKKYPSMYWRVRLGGRGIVSNPPGKISYGIVVRCYRMAQKIYKFNMRCPNCGQRLADEAGRCPVCGTVIDEETRRKAMNEDDFASSSFEGTCQSMGEQASAAQSGRTDQMAPDEKRYPARPMKWYKFLIYFSLVLTGFANIWTGVEAVLGMQYETKSQAAQVYAVYPGLHVLDIIYGVLLILLGVYALIVRQYLAGFKAKGPKMLLIMYIVSLVIEVAYIAASSLISGVNLLTASESGTMLISSMIVSLFMIGANKVYFDKRAHLFNKMASSDIGIDLGTASVLVYVRGKGVVLKEPSVVAYDKDTNEIKAIGEEARQMMGRTPGNIEAVRPLRQGVISDYTITEKMLRYFIQKAMGRKTLKRPRVCVGVPSGATEVEKNAVWQAALEAGARDVMIIEEPIAAALGAGIDISRPCGNMIIDIGGGTTDIAVISLGDTVVSRSLKLGGDDFDEAVIRYLRKQHNLLVGDRTAEDVKIRIGGVYERVSPLLMQVKGRDLITGMPKTVEVSSTEMLEAFKENIIQILEVVHQVLEDTPPELAADIATRGILLTGGGSMLFGMDDLIGETTGIQTTAVDDPISAVAIGTGRYTEFIEGKQTRAMESIQGLVEHIVYHNDTNGYTVFSLMCQGEEIVCVGNVTSLDEGEYLKAEGEYTEHQVYGRQFKVTSMSVEVPEDEYSIERYLGSGAIRGVGPSLAARIVKKFKKDSFRIIEEEPERLAEIKGISERKAREIYQQFHEKQDMRQAMMFLAKYGITTTLSLRIYKQYGEEMYRIIQENPYRLADDMNGIGFKLADEIAKKAGIGSHSDFRIRSGIIYMLQQGTLSGHIYIPAALLVEKTAQMLGVEEEAVDHLLQSLQMDSKIVVKKIDDVSVVYGASLYRLELETAGLLKNLGVDYSVDEKEVGKVLDRIEKREGIDLDDHQREAVYSAAGNGVLVITGGPGTGKTTTINAIIKYLEYEGLEMRLAAPTGRAAKRMSEATGREAQTIHRMLELSGGPDDDRLRTQFERNQDNPLETDVVIIDEMSMVDIYLMNALLKAIAVGTRLILVGDVNQLPSVGPGNVLKDIIDSECFQVVRLTKIFRQALESDIIKNAHLINEGQQIELGNKSQDFFCLKRYDVQQILGVMVLLIRDKLPKFVNARPYDIQVLTPMRKGELGVERLNTVLQHYLNPPSPDKKEREFHQGVIREGDKVMQIRNNYQIEWEVLGHYNLPLDKGVGVFNGDMGVVREINHFAEQLVVEFDEGRRVTYGFAQLDELELAYAITIHKSQGSEYPAVIMPLLSGPRMLFNRNILYTAVTRAKQCVAIVGDEHTVRHMIENEKQQKRYTSLNLRLREMNTLSMERMKIRNPKIKKWRGLLILALIGAIITVAMEIYLSDHALTPDQISKKGQYCAVTSRWMSDAFATETMNGEDTYDYFLVLSEDSDRFFMIRSWTDDEQCLKYIDSLYESGEYEKIDQEWTGGSQPVDDEVKNYAIQYVSEYLGMNLTTDMYDDYFYSYCMDLTSMGDMDTVIGGMLLMFALLLIGLLGCLISAIGWHGRIAALKRQDFFPKFEQNWMQSGEKMDTKHRQVVVVKDFLLVPSYKDIVIPLDQAVWCYVLPLAKKNYGLYIMGTDGKAVLVCRVKEKGSVYVREYLEQIHLSAPWMAIGYSAENRQAFGAYEKSETIAKIIAKKDKMMSQFPFMYGETGEPKDGNTKIAGQGHCRTENMECGKELDMQKETDKQILSTLNQDNFQNSSGGKKAAEDDEMGLFSQGFMDRMREMVSEQFGEEAAERFMVQNKDMIKEEKTTSAVPESEKRLPQTKNADVPTEQSVPLTAEHPDISEETATKGPSKRSYRRWVWRAAAVLVVVLAGFGVHRAGSVSATKIPAVNTAPETTAGIDYSKIGSLKDIISTLDYTSFSKEIKQVYVPGAIAEGYKETDRSEQSKYINIFYENDGDGWYKYRQMTVEQNTFLDTEEGDWDSLSIGQYPGVYIEKDHTGNLWWFDYTYAYQLQGNLSEEEMIAVAESLTAEKMRKVIAFLMTVTVCLSLMIMPAMAAEDYPEVGFDFEAFEAQERIDGTPKVARWKYTSSTSQGISVEDKTATACIDVTGYKGTVTRIVAYMYIQQLSGGNWVTLDSHRYEFNSWHGDKEITYSPCPHGYTYRLKASYYVYSGSQYEYISATSANFVYNMTHQEYFDKLTDSIDTLSDILDTEHYGMCLVDKDGYIIKWYYEKFFNIKASAAVGRHVTEVIENTRLHVVAQTGVKELMQLQEINGSMVITNRIPLIHNHEVIGAAGTIIFRDIKEIAHLHSRMSKLEDNFKAYRSEIAKMYAAQYHFDDIITNNQKMLNLKHLGQTIARSDASVLIQGESGTGKELFAQAIHNASLVSHQPFVSLNCSSIPKELLEAELFGYESGAFTGARKDGKIGKFELAGEGTLFLDELGTMPMDMQVKLLRVLESKEYVPLGSNKKVPFKARVIAATNENLSNSMQNGSFRSDLYYRLNVININIPPLRERIEDLPVLCSSMLSQKEGLYHQSQLHMSQEAMDLLNLHNWPGNVRELRNVIDRAAIICEGSEILPQHLPEYIQAYRKSSPLESSDGYYHYEIACLERQLITKALRDNGGNRQAAARQLGIHRSLLYKKMKDLGIHEMNWKEWTALLYPPECPVCQKLLSDTEDRRRHIHGDCYRKLRRIVEPMCKRCGKPLLSAQQEYCYDCQRRSSACEAGHSLWMYDAVSSESIFAYKYDGKRVYVDFYSQAVLHFYRDWIESLHVQQLIPVPLSRRKQRQRGFNQAALLAEKIAEGLSLPVNTRGLRRIHSTAPQKKLGKYERGENLKHAFVADARYLQGVRRVLLIDDIYTTGSTVNYCAGALKQAGIEKVWFLTLCTGGVFMDAEMNRKLSAVSPEEVETDTVKQEYGERMKKENGFENFKGNDPKIRHIRELGQRIARTDFPVLITGETGTGKEVIARAIHMESGRSEEPFVAINCGAIPAELLESELFGYEGGSFTGAKRQGKIGKFEMANKGTFFLDEIGDMPLHMQVKLLRVLQEHEIERVGGSGPIPIDVRILSATRMNLMEMVQAGTFREDLYYRLAVVNIQTVALRACPEDIILHALDYLDELNRQYKTHVDLSDGARRCLKAHSWPGNVRELQNVISGAYATCEDSLITLDNLPKIITVNQKEERIMEDIEHLPLKEKMNRFEKMLLEEALRSNKSMTAAATSLGIERSLLYKKLKKYHLKEMRVKITLACTECKQRNYNMTKEKKTHPDRMETKKYCKFCKKHTLHKETKMGNATNETTKKTNWLDAIKAQFKRIIWPTKEEAARRSAVVLAVSVLLGVIIAVLDRVLLLLTDVIISLMADRNEYLEDPMWYVVHTYSGYENKVKTNIDKSIQNLHLEDQILDVQVPVQEVIEVKDGKKKTVQKKLFPGYVLLHMIMNDETWYVVRNTRGVTGFVGPESKPVPLTEEEMTAMGINMNDAEKDEPDQMILVDIEEGDMVNIVSGAWQDKEGIVQSVNSANGTVTVGLDMFGRETAVEISFLDIRKMMAKKVTGYIKLQIPAAKATPAPPVGPALGQHGVNIVQFTKEFNARTADQAGMIIPVVITVYNDRSFSFITKTPPAAMLLKKACKIESGSANSKKQKVATISRAEVQKIAELKMPDLNAASIDAAISMIAGTARSMGITVEDMKKGKRYVESAKLVDRTNLYDVEEAVSIIKKTANAKFDETIEAHIKLGVDGRHADQQVRGAVVLPHGTGKKVRVLVFAKGDKVEEAQAAGADFVGGQELVPKIQNEGWLDFDVVVATPDMMGVVGRLGRVLGPKGLMPNPKAGTVTMDVTKAVNDIKAGKIEYRLDKTNIIHVPVGKASFTEEQLADNFHTLMGAIVKAKPAAAKGQYLKSVTITSTMGPGIKLNPVKLVMAKVEIKQPIVDEIAGYLADAQAMVLVDYRGLTVEEDTQLRKALREAGVDYKVYKNTLIKRAVKGTVFEAVTDLCEGPTAIATSASDATAPARVLYEAAKKMPNLELKGGVVDGTFYDEKMIQVIATIPSREVLLGKLLGSIQSPITNFARVIKQIAESKEEVAMAKLTTAEFIEAIKELSVLELNELVKACEEEFGVSAAAGVVVAAAGAGEAAEEKTEFDVELTEVGPNKVKVIKVVREITGLGLKEAKEAVDSAPKTLKEAVSKEEAEEIKAKLEAEGAKVTVKMKQRKPGCYIAAVLLAGLMLGGCGNPNAKANTAESVSASDSETVSESEEIVSAEAETENGFETETETETEIETETDPIVIVLDPGHDSEYCTRNHPDLGVNEQDLNLTIALACRDRLQQYQGVDVYMTREDGSCPDAEHQGEYCIEKRTGYATDLGADLFVSLHNNGTTGVYGAEANGTEVYVSNYSAYTEEGKKLGQMVLDNLAQLDLNPRGVFVRTKEEKGHYDDGSVQDWYYLISYSVEGGHPGMIIEHAYMDNPHDNAILKDEAQLKAMGTTDADAIAAYYNLQIKTKTENMSNTEDRNDETINLDLDEHTSAEDADMDVNTEANANADDDFDYLKEIEEIEAQEKELEEQRQKKKEELERRREEREKDEKKSAAQRKREMKERKKEAEWLGEPFEDDVETVPTAKKKKSKKGLVAIVVIVLIALAGGAAFAYKMQADKKELADFSQKVAAFQSEKLDGRDFGSHQSYFTDFMKECQDAIDAGDLKKMEDLDKKWSEVENTYTTVSNGKTSLDAFASGIDQALSTYSITDDYKATYETLKKDVEAAQKDCDYEKVSDFQKQLDALATNLKSDNLKVIQNLKNDISSVSLDKDYVSADDQKKLDAYSTEVEKYIKEENYAQAVTTLNSWKTDVTALKKTIDDKKAAEQAKAESEAESKRAAESKAAESKAAESKAAESKKNQTTETKKDSSKNNSSSSNSSASSDYVLPGSSSQYLSASDVKNLSSYQLMIARNEIYARHGRKFNDSELQAYFNGKSWYKGTVNPEDFSTSVFNDYEIKNIQLIQSYEMNKSRIKPVKSGRNIRMSYSRQKEVLEMPNLIEVQKNSYDWFLKKGLKEVFEDISPITDYSGHLSLEFTDFSLCEEEAKYSIEECKERDATYAAPLKVKVRLINKETDSFSEHEIFMGDLPLMTATGTFVINGAERVIVSQLVRSPGIYYGVGHDKLGKELYSATVIPNRGAWLEYETDSNDIYYVRVDRTRKVPVTVLIRALGVGTNQEIIDLFGEEPKIMATLSSNKDVSDSYQSGLLELYKKIRPGEPLAVESAESLINAMFFDPRRYDLAKVGRYKFNKKLALKNRITGFALAEDVVDETTGEIIAEADTMVTEDLAQKIQNAGVAAVYVQTEERVEKVLSNMMVELTSFVDVDPETLGITEKYVYYPVLRQILDENEDIEDIKDAIKKNAADLVPMHITKEDIFASINYNMHLEYGVGNADDIDHLGNRRIRAVGELLQNQYRIGLSRMERVVRERMTTQDLEGVSAQSLINIKPVTAAVKEFFGSSQLSQFMDQNNPLSELTHKRRLSALGPGGLSRDRAGFEVRDVHYTHYGRMCPVETPEGPNIGLINSLASFARINQYGFIEAPYRILDKTDPKNPRVTDEVAYLTADEEDKFRVAQANEPIDENGYFVNKTVSGRYREETTSFQRSQVDLMDVSPRMVFSVATSMIPFLQNDDANRALMGSNMQRQAVPLMLTDSPVVGTGMEAKAAVDSGVCVVAKRGGVVERSASNEVIIKADDGTRDTYKLLKFSGSNQGACYNQRPIVFRGDRVEKGDVLADGPSTSQGELALGKNPLIGFMTWEGYNFEDAVLLSERLVQEDVYTSIHISEYEAEARDTKLGPEEITRDVPGVGDDALKNLDERGIIRVGAEVRAGDILVGKVTPKGETELTAEERLLRAIFGEKAREVRDTSLKVPHGEYGIILDAKVFTRENGDELSPGVNQCVRVYIAQKRKISVGDKMAGRHGNKGVVSRILPVEDMPFLPNGRPLDIVLNPLGVPSRMNIGQVLEIHLGLAARALGFKIETPVFNGADENDIMDTLELANDYVNTSWEEFSAKWKDTLDEKVYNYLDENKAYREEWKGVPISRTGKVQLRDGRTGEEFDSPVTIGFMHYLKLHHLVDDKIHARSTGPYALVTQQPLGGKAQFGGQRFGEMEVWALEAYGAAYTLQEILTFKSDDVTGRVKAYEAIIKGENISEPGIPESFKVLLKELQSLALDVRVLRDDQTEVELGETVDYGDDDFNSIMQGDGGFRFDTEESLGDYVHKQQTVNSDGEFVDVEDEGSADDDTEEFYGEDSDNEMPETVSNEAYQPMTFDAIKIGLASPEKIRQWSHGEVKKPETINYRTLKPEKDGLYCEKIFGPSKDWECHCGKYKKIRYKGVVCDRCGVEVTKSSVRRERMGHIELAAPVSHIWYFKGIPSRMGLILDMTPRNLEKVLYFASYVVLDKGSTTLENKQVLSEKEYQEECKNFGEDSFRVGMGAEAIMELLQAIDLETEAVQLKKDLKTSSGQKRARIIKRLEVVEAFRSSGNKPEWMIMTVIPVIPPDIRPMVQLDGGRFATSDLNDLYRRIINRNNRLKRLLELGAPDIIVRNEKRMLQEAVDALIDNGRRGRPVTGPGNRALKSLSDMLKGKQGRFRQNLLGKRVDYSGRSVIVVGPELKLYQCGLPKEMAIELFKPFVMKELVSRGIAHNIKSAKKMVERLQTEVWDVLEDVIKEHPVMLNRAPTLHRLGIQAFEPVLVEGKAIKLHPLACTAFNADFDGDQMAVHVPLFVEAQAECRFILLSPNNLLKPSDGAPVAVPSQDMVLGIYYLTLEKPGDKGEGMFFKDVNEALLAYENHIITLQAPIKVRRTGIVGGEEVTRVVSSTLGRFIFNEGIPQDLGYVDRENRDNDLVPEINFLVAKKQLKQIIDKCIHTHGATKTAEVLDYIKATGYKYSTISAITVSISDMTVPEAKKELLASAEATISKITAQYRRGLVTDEERYKAVIETWKQTDDQLTKALLDGLDKYNNIYMMADSGARGSNQQIKQLAGMRGLMADTSGRIIELPIKSNFREGLDVLEYFISAHGARKGMSDTALRTADSGYLTRRLVDVSQDLIIREIDCSEDSENIPGMWIDAFMDGREVIESLEERMTGRYAAADIVDPATGEVLVKADHMITPKRAAMVAEAGVTKVKIRTALSCRSHLGICAKCYGANMATGQVVQVGEAVGIIAAQSIGEPGTQLTMRTFHTGGVAGDDITQGLPRVEELFEARKPKGLAIIAEFGGTVSIRDTKKKREIVITNDETGDSKAYLIPYGSRIKVQEGQVLEAGDELTEGSVNPHDILRIKGVRAVQDYMIQEVQRVYRLQGVEINDKHVEVIVRQMLKKIRIENSGDTEFLPGTLVDVLDFEEINENLKELGERPAEGVQVMLGITKASLATNSFLSAASFQETTKVLTEAAIKGKVDPLIGLKENVLLGKLIPAGTGMKRYRTIKLDSEIDENEELTLANDDDAYLDLSDGISGEEADEDMAETEETAVETAPEEAEDDAFDGESEDDTTDENMTTGLNHGYGGVKVNKKLNVKGFCTDLAYDLVGSVLYAAGIVCFVNPANMAPGGMSGVAILLNYLWGLPIGTMTIVLNIPLLILSYIFLGKSLTWKTVKSLVISSLMVDLVMARYAPIYAGDRMIGGVFGGVLMGAGLAIIFLRGSTTGGTDIISFLVKKWYPHVPIGRMIMVVDCIIIGVSVLVFGNLESALYGLISLYCCSMVIDSIIYGLDKGSMVMVVSEKNDEIAAQIMDELERGVTLLKGQGAYTGTDRDVLMCAVRKQQFARVRAIIYEKDPNAFVIVSETSEVLGEGFKQVSGLMKKLVSFMLVAAMVVATLTGCGSSDNAKSTEAAGESSAAGESSAAAGTTFKIGGIGPVTGGAALYGLAVQRGAQIAVDEINAAGGINGTQIEFNFQDDEADAEKSVNAYNSLKDWGMQMLMGTVTSTPCVSVAAKTAEDNMFQLTPSGSSVECVQSDNAFRVCFSDPDQGKKSAQYIGEHKLATKVAVIYDSSDTYSTGIYESFKSEAANQGIEVVAEGAFTADNKTDFSVPLQQAQAAGAELVFLPIYYTEASLIITQANKMGYAPQFFGCDGLDGLIGVENFDQSLAEGVMLLTPFAADAQDDLTQKFVSAYKDKYGETPIQFAADAYDAIYAIKLAAEKENVTPDMSVSDICEAMKKGMTEISLEGLTGTITWTASGEPDKEPKAVKIENGAYTAMEMQFISYLINGISLGSVYAIIALGYTMVYGIAKMLNFAHGDIIMVGSYVVYIAVSSLGLNPILSVVISAIACLVLGVVIEKVAYKPLRHASKLAVLITAIGVSYFLQNVALLIFGANTKSFTSVVPAVSVKLGGITITAETIVTILACVIIMICLTLFINKTKAGHAMQAVSEDQDAAQLMGINVNATISLTFAIGSALAAVAGVLLCSAYPSLTPYTGAMPGIKAFVAAVFGGIGSIPGALIGGILLGVIEILSKAYISSQLSDAIVFGVLIVVLVVKPTGILGKVIQEKVMTVMKKKLNKTTKSNLITYAMVVIVYIIVQLLVSGGAVSSLMKGLLVPLCVYSILAVSLNLTVGILGELSLGHAGFMCIGAFTSATFSKLTNGVIQPAGFRFFLAILVGAVFAGIFGLLIGIPVLRLKGDYLAIVTLAFGEIIKNIVNVIYLGRDSHGIHFSIKDAASLGMDADGEMIIKGPQGITGTPTDSTFTIGIVLILVTLFIVLNLVHSRSGRAIMAIRDNRIAAESVGINITKYKLMAFSISAALAGVAGVLYAHNLSTLTALPKNFGYNMSIMILVFVVLGGIGNIRGSIIAAVLLTMLPELLRGLNDFRMLIYAIVLIATMIITNNEKIMNTIRRFLPKKQAQPVKEETKMAMLEVKNLGISFGGLRAVDGLDMTIEKGELYGLIGPNGAGKTTAFNMLTGVYKPTDGVIKLDGEDITGKSTIEINKAGIARTFQNIRLFSELSVLDNVKVGLHNHYKYSTIAGILRLPAYRKAEKEMDAKAMELLKVFNLQDEWDYKASNLPYGKQRKLEIARALATEPKLLLLDEPAAGMNPNETGELMDTIQFVCKNFDMTVLLIEHDMKLVSGICQKLTVLNFGQVLAQGKTSDVLNDPKVIKAYLGEMSMLKVTDLQVYYGVIQALKGISFEVNEGEVIALIGANGAGKTTILHTVTGLINQKAGKIEFEGKDISHIPAYKIVAEGMAHVPEGRRVFAELSVYDNLMMGAYTRKDKKEIAETLAMVYKRFPRLEERKKQMAGTLSGGEQQMLAMGRALMSKPKIILMDEPSMGLSPIFVNEIFDIIKAVSASGTTVLLVEQNAKKALSIADRAYVLETGKIILEGDAKVLMNDERVKKAYLGEMGSNRIITIARQYGSGGKTVGQMLAKDLGIDCYDREILRMASDDSGLNLQMFGNPDERRRNTFLTRAIKKVYKGEVIPPDSDDFASSDNLFNYQAKILKELAEQESYVVIGRCADFILRDNPNVVSVFIHAPFDYCVDRGLEKQSMTRVQMEKYIQKTDKQKGDYYMYHTGQHWSDARNYDLCLDSSKLGFEGCVEAIKAYMAVRFKEQMNDLFMNSFIVLLFSYDSEKQIGIRMAYYMIMYGIKSKWKMTTEQQYIASLDIEASYNLAKQMEAYRTNPVLGYRPAGSKAEFETGEMLKSYMEDLGLSNVRKDEIKVDGWEFEKAVLAYADAAGERQEVQLGAYQTDFVTKGAETFQVVYVGKGGEKDYADKDVTGKIVLAEINQRDEWWINFPVYQAHEKGAKALIAVQIGGYGQVDEKALNAQDIAGPPEAAAFSMSFEDSEKLKACLDEKGEITVTLDASSRVMRDVSTYNILGEIPGRRSDRMILLSAHYDSYFSGFQDDNTAVAMMLGIARAFIKMGYQPENTWVFCAMAAEEWGIADSKYDWSTGAYAEVFNVHPEWAGKVIGDFNFELPALSNGNLDGIRCTYEYKDFFEDTLKTLPALSPAYPEGVLVSAPIETWSDDFSVAISGIPSMVNEFSAGSFMTTHYHSQYDSDAYYNEAAYRFHHELYGLLLMHLDRQSVAPLNFAEVFEQASASLDVLMCQKSGSRVTALLNLLGQTEEVAEEVYDRIYDINEAGVDSEQCREAENILLKVFKMAQDKYVRLTWEDAVVFPQEAAQNNLRYLKKAIRALKRKIPDAEAAFEALYEIDNNAYAFQFSKQVYERFTDYVLDQNSDRLQWGRGRIVHHENLYDLVAQLMDKYHQGATDFANEIAELEKVAKRQKAYLRDDIEYMLQSTEKMLLLLQAANERLKNIQEKNMESERLYQVQKEDLPKLENLLTQCFREDPLYHSLIPNKDVRERLMPELFKCDLTEFYECCDIYADSPECNSLLVVSDEMEPYEHLFKAYFTEIAAALKTDGYLLKEDASMHTFWNFILGRDYLNSAWTDQLHQKHRLHVIYLAVRPNMQHHGLADVLMNEVIRYADKHRMMVSLETHNPVNVEFYQRFDFKVFGIVQKHFDLKQYCLIREIRKKGEMEKYMIALDQGTTSSRCILFDHGGRIAGVAQKEFSQIFPNPGWVEHDPEEIWQSIQDVMAEAMGKAHVTAENIAGIGITNQRETTVVWDKKTGKPIYNAIVWQCRRTAPIIEDLKAKGYEAFIKKTTGLIPDAYFSGTKIKWILDHVEDARERAKKGELLFGTIDTWLIWNLSGGRIHVTDYTNASRTMLFDIHSLCWNERLLEVLDIPMTMMPEVKSSSCIYGYTDPDVTGGTIAISGAAGDQQAALFGQCCFEEGMAKNTYGTGCFLLMNTGHHAVESEQGLLTTIAAGTDENVEYALEGSVFVAGAAIQWLRDGLELLKKSSESEAFAESVDDTAGGYVVPAFTGLGAPYWDQYARGAVVGITRGFTKAHFIRATLESLAYQVYDILKAMEKDAGILLTDLRVDGGACANNFLMQFQADLLDRHVLRPECIETTALGAAYLAGLAVGYWKDKDEIKQNWSLSRTFIPDMQNEKREKLLQGWHKAVRCAFDWEEHMIVVFFAVSLLASIVGSICGIGGGVIIKPVLDAMNVMSVSCISFLSGCTVLTMSVVSVYKNMRAGKKLNLRIATLLAVGAAVGGVAGKMMFMAVKTSVGNENFVGMVQAIVLIGVTGITFVYTIFKKKIHTLTLNNAAVCVIVGLVLGIMSSFLGIGGGPINLMVLGFLFSMSTKESALASLYIIVFSQVTSLVQTVVTGTIPPVQLSYLAVMVIGGLLGGTIGSKINKKIEDEKVDKLFMALMFIIICINIYNTYKFAVALMADNLLVVHGGGPTAVINASLYGVIREAKKNPSIGKVLGAIGGTGAIFTEQFLDLTAFSDEKLKLLLHTPASAIGSSRYPLYEEDYAKMPEIFKKHHIGYVLLNGGNGTMDACEHIYEVCRDHGIGVAGIPKTVDNDIAMTDHVPGYGSAARYLAATTQEVGEDVKSLPIHVSVIEAMGRNAGWITAASALARRKKGDAPHLIYVPERPFHEDEFLEDVERLYKEKGGVVVVASEGLTNVNGESIVPPIFKSDRAVYYGDVSAYLAELVIKKLGIKARSEKPGICGRASIALQSPVDRAEAILVGELAVKAVTSGNGGHMIGFKRQPGDIYQVEPVLVPLKDVMLYERKLPEAYINERGNDITDEFVKWCEPLIGGPLPEFLNFRDYIMKHIYLNLKRFDIPTEAGGVNRIASPAEWGPYIVSHTQDQLAAYNPKDVEFAMFFPEAHLIGAVSARKADSALKIGPQSVLGQDTAVGGNFGAFTSNRTGNAMKAIGCDAVLIGHCEERRDKLSIIAEGKGTDAAAVNRILNKEIKAAIAAGLDVLYCIGENADEQPRWQEVLKEQLTVGLEDVDKSKVTIAYEPVWAIGPGKIPPDADYIRKIASYVKEVTDGMDVVYGGGLKTDNAKMLASVKEIDGGLIALTRFSGEIGFYPDEYLEIIKTYLGYMGKKSKGADFVGKIPKGVWLLISLVVALILWTVLSIIPSTSRCFPNAIKVIGSIQTMVSRGLLFKDIGSSLISVLLGFLIGFVTAVPVAFLMAWYRPVRFIIEPWIQFIRNIPPLAYVPLVVIGVGVGRTPQVIVIWLATFLTMTVTIFQGVINVDETLIKAARVLGAKDSDLFVKVIFPATTPFIITAIRLGISTALTTLIAAESTGAVAGLGMRIKALSNSYETTPMLLYIIIIGIIGMLAEKILKYFERKLTGWQEKREIMAGKEGNIKVSIRNVVKKYDTRNGEMIALNGANLDIMENEFICVIGPSGCGKSTLLNIIAGLLEPTSGEVIVDGHKVEGTGVDRGVVFQQYALFPWLTVKKNVQFGLKLQGKSQKEMDDIAEKYIKMVGLEKFIDSYPKELSGGMKQRVAIARAYAVNPSVLLMDEPFGALDAQTRTQLQTELLKTWQEENKTCFFVTHDIEEAIVLASRVVIMSARPGRIKEIIDIDIPHPRDQATKMSPRFVELKNYIWSQVYQEYLEVQKMKKRIMAVVVTAAMVMGALAGCGSSSAKETQAPASTEAASETAAASETTGETEASDAASGDLTHVNVAYMANYASLWQVATAINKGYFKDEGLDVQLYMFQDGPTEIASMESGSIDVAYIGPGAHKLCIKGQADIFCFSQLGNADCVMGLKSHGVNSLEDLKGKKVAYASGTSSETILKRALNSVGLTMDDIEAYDMEVSNMVSAIVSGSIDACAPWSPSSTTIANELGDDVQTFCTNTTFSDIAADCASWICMPSYAETNKDVLVKFTKALYKAMDFASNPDNYDEVAGYVAQECGTDKESALAQTGDGAWLDSATLLKYVGDGTIKGYYEVQQKNFIDNGDVESEVPVDDYVLFDVMEEAGKMAHYHEAPFVCRKMSNFGVPGGGLSAGFPIFWKQTTYNSDNIIIGRKMKLDFEYGLGTMQAELPDNTDVFISGETVKDPACIPEDQLEAAYLESLAHPIGMPTLTELAHKGTTVTIIVPDRVKGGEQPTSHRKLSIKYILKELYAAGVEKKDILFIISNGLHPRSKASDAKAIFGDELFNEFWHSGQIISHDSEDQEHMIYLGTTKRGDPVYMNKYVYDSDLPILIGHVQGNPYGGYSGGYKHSATGITNWRCIASHHVPSVMHRDDFTPVNGGSLMRHKFDEISMHMEEKMGHPFFCCDAVLDTYSRQIAIYSGYAKEMMPISWKLADKRTYVHWAEKKYDVLVFGMPQKFHYGDGMGTNPIMMMQALSAQVLRFKRIMSDNCVIICSSACNGYFHDELWPYLREQYELFQHDHMNTLPDIDRYGEYFATNEEYIRKYRFCNAFHPFHGFSMMSCGHIAEMNTSAIYIVGAQEPGYARGMGLKTRATFEEALEDAKKKFVGQNPNILALPLTYKRAAVHLCMKNPEEDCMDEYGHRHMIQFQMFDHQPERCEKYHQMLKDNLPVLEGIGSEADFEKYGDSLGWFDIDTWANEAELSAIEELAARVRRDADVFVLIGVGGSNNAARSVIEAFPECDGPEIVYAGNSLSPWAFEQVMNKIRGKSVYIDCIAKNFQTLEPGSAFRVLREYLYETYGDKANERIIATGSRNSLLETICKEHGYSFVEFPQTVGGRYTAVTAVGLLPMAVAGIDIRALVKGAADMAAELKGCRDITQSAYRYAVARNLYYNEGYRMEMLASFEPQLHWFYKWWIQLFAESEGKEDQGLYPISGEYSEELHSVGQFLQDGSPVIFETFLHVKDPQASMIVHPDGRVKDDFDYLNGKDFREINEAAYGATLRAHSEKMPCMVLEVEKLTPYSFGEIFYFFMYTCYVSAGILGVNPFDQEGVEAYKQRMFKALGKMTLKEIAKEAGVSVSTVSRVINQENTKAASPKVQARIWEIIRRTGYSPNKTARNLKLGQSAELRDPDPKSIACVYARTHTDMSDPFFSQIVKALELEAIKSRYFIRYSFTSQDLGRPETAAQLTQFPADGIVVLGRYDQRIASLVSNLSKNVVYTGLIPMDFQFDQVVCDGSEIVYTAISYLKSLGHTVIGYIGEQDKEPRFSGYKEALSKLNLPFAQRNTANVHQTSEGGYEGMKMLARTCDDLSAILCANDRTAIGVLHALKKLNFRVPEDISVISIDDIDIAQYMSPMLTTVHIPTDELGKMAFKVLLDRVSGGHRMPLKTFLPYYIAKRDSCCPLNRDRRLFSTLRQQASHMKHEYYQYNAEEILSKGPKFPLIIMKDNAEVFKSMADEMADTIVEHNAKGEKTVFICPVGPVGQYPYFVDRVNSEKISLKNVWFINMDEYLDDNKEWVSIDHPLSFRGFMKRTVYDKINPELVMPEVQRIFPDPKNPGHIPEVIGQLGGVDICFGGIGINGHVAFNEADGSLSNEEFLAQQTRVLKITPETRTANAIGDFNGALEDMPHYCITIGINEISHARKIRLGCFRNWHRAVVRRAVYGEQTSEFPVSLLQNHSDINLKITEFVASLTDMKTLIKNGQVYMNRHFEKKDLLLDDRKIAVIGDFLEPEDADTAVYDAEGCYVTPGFIDVHTHGGFGVDVNAATQEDYEKIGHFFAKEGTTSWHCSILTDTEEQTDWCIKEAVKHYETNTAAGQPHGNCADLMGIHLEGPFLASEYKGAMPEYLLRTADMPLLKHYQETAGGFIHYITVSPEVAGIPEHVKDITEMGIKVAIGHSGADYATSWKCIDAGAAAATHTFNAMRLFHQHEPAIMGAVLESDVYCEAICDGRHLHPGSVRFLLKMKGYDRVIAITDSIMAAGLPDGNYKLGVNDVIVEEGDAKLKDGTRAGSTLTTGQAFRNLMKFTGESPEKILPLLTENPATMLGLQNSIGFISEGRDADVLIMDSEFQIKETFVKGRRIIMPLIPLRPLLETVDKYHYAQGAFNVNAVAQAKAAIEVHEMFRSAAILQGADLANGFMGGRTDFQNATLEDKKIGAKNIANAVKKYAEDSPIPVVLHLDHGKNFDSCKAAIEGGYTSVMIDGSSLPFDENVELTREVVKYAHERGVSVEGELGVLAGVEDHVFSATSTYTNPLKAVEFFKKTGVDALAISYGTMHGASKGKNVKLRKEIVIAIKECMMHEGIFGVLVSHGSSTVPKYIVDEINALGGNIQNAHGISVDELKAAIPCGIGKINVDTDIRLAVTRNMKEFFHNYPEKRNSPSIGGVYKLLEEKKDQFDPRAFLPPIMDTVMYGNIPDEDVAALVAVIEKGVKEAIGTLIVQFGSFGKAPLVEQASLDEMAERYKKMMVWLIVATLAASFIKGVCGFANTLVFTTILSFSFNNIQITPMDLIIGYPANVIIAWKERRQINWRISLPVATLVILGNIPGIFMLKNVDTRTIKVIFGFFIIAMGIEMLMREKAGKKQKQSKIILGLIGVLSGLCCGLYGVGALLAAYMDRVTEDSHAFKGNLCFVFWIECTFRLIVYPCIGILNWQIFRQAVCMIPFMVLALFFGMKCCGHLNETVIKRLVIIVLILSGIALVIQNLCMIYTVTFNPSLDYIVAVDDFQLGLTNRTSSELILPGGKGINVSTLLMNLGIESTALGFMAGFTGDEIVRELQEMGVKSDFIRIDEGISRINLKLKSIDGTEINGSGPAISADKVEQLMVQLDALGEGDVLFLAGSIPSSMPDDMYRRIMARLEGKGVMIVVDATKDLLLNVLEYHPFLIKPNNHELGDIFGVELKTREEVVPYGKKLQEMGARNVLISMAGEGAVLIAEDGQVFDKPAPKGHLVNAVGAGDSMVAGFMAGWMDKQDYEHAFCMGIASGSASAFSEYLATKSEIEAIYKQVRVEDMRITDLLDKQSISLNGAPKDKKEAIDQVVDLMAKSGKINDVEAYRQRVYAREEESTTGIGEGIAIPHGKCDAVTKPGLAAMVVKDGVDFDSLDGEPVHLIFLIAAPNTEDNIHLDVLSKLSVLLMDEQFTADLLNAKSVDEFLEIVDKADDEKSDIDERLADTGEAEGAQAKLLAVTACPTGIAHTYMAAEGLEKAAKAKNCFIKIETRGSGGAKNVITDQEIAEADCIIVTADTQVPLDRFDGKKVIIRQVSDGISKADELVDLALSGNVPVYHAAEGAKTEVKSSGGIGHQIYAQLMNGVSHMLPFVIGGGILIAIAFLIDGLSIDINSLPADQRANFGTITPIAAMFKQIGGVAFGFMLPILAGFIAMAIGDRPALALGFVGGMMAANGKSGFLGALVAGFVAGYLILALRKACDKLPTALEKIAPVLIYPVVGILVMGFFMMFIVEPIMGGINTGLNNALTGMGSSSKVVLGLVLGGMMAIDMGGPFNKAAYVFGTAAIAAGNYDIMAAVMIGGMTPPCAIALATILFKDKFTKEERESGPTNFIMGLAFISEGAIPYAAADPLHVLPSCIAGSAIAGGISMFFGCTLMAPHGGIFVFPVVGNALMYLVALVVGTAVSAVLLGLLKKKVAMKEFKYVITDKEGIHARPAGELIKVVKGFNSTIKIAKDGKEADCKRMFAVMGLGVKNGQEVVFTFDGEDEDAACEAVSKFMKENLMFPYQRGELKRLLHDGCPVMGYAAVFSLAEENQDADIMQIYKGKSVFGGIAIGKISVYKKDEQLVKRVKIEDADAEMERYTDARNIAAAQLQKLYDKALKEVGEANAAIFEVHQMMLEDEDYNESVENIIHSQMVNAEYAVASTADNFAQMFEAMDDDYMRGRAADVRDISERVITVLAGGAGSGLDSDEPVIIAADDLAPSETVQLDKDKVLSFVTAHGSENSHTAILARTMGIPALIGTGIDLDETVDGKLGIVDGTNGVVYVDPDAELLEEMKKKQQEEQEKKRLLQTLKGKENITLDGQKVMLYANVGNIKDLGIALQNDAGGIGLFRSEFIYLGQDHYPTEEEQFQIYKTVAETMAGRRVIIRTLDIGADKQCDYFELDKEDNPAMGLRAIRICLTRPEIFKTQLRALFRASVYGNINIMYPMIISVDEVRQIKAIVEEVKAELAEQGIEYGNPAQGIMIETPASVMMSRELAEEVDFFSIGTNDLTQYTLAIDRQNSKLDKFFDSHHPAVLRMIQMTVENAHKAGIWCGICGELGADQALTKDFLAMGVDELSVSPGSILPLRKIILETDVEAYKKSKQTKMLTEQRYETILRMLDERGSVTVTELKDLLDASESTVRRDITALGKAGRLIKVFGGAVAMEHIMTGSEPTVAQKVEVNKEEKCRIASYAARLIEPEDFIFLDAGTTTGYMLDYLEEKNATFVTNAVAHAQKLAEMGMKVLLVGGELKSSTEAIVGGQATEMIRRYHFTKGFFGTNGVTKKTGFTTPEASEAVVKEIAMARCRDRYVLADHDKFGKVSSVTFGAFQSAIILTDRKVPGIEDVGNVIVVMKKRILAVVMTAAMVLGALTGCGQSSKDDKTESATAAETETISYDVLTQVRVGYMPNYESLWEVATAINKGYFEEQGLDIKLSSFQVDEAGIGLMASGSVDVAYIGADVHKRCIEGAAQIFCSSLKVSGETADCQGWVCLPGYVEANKDILVRFTKALYKAMDYGSQEANYDEVAGYVADICGTDKATELEQAKEGNWIDSKTLLQYLGDGTLKKYYESQQKNFIDAGDVDKKVPIEDYVLFDVMEEAGKMGREINQRKAAIIGCGFVGSATAFTLMQSQLFSELVLVDVDFDKADGEAKDIAHGIPFAGQMKIHAGVYEDLSDAAIIIVTAGAGQKPGETRLDLVHKNVAIYESIIPRIAEQNKDAILLIVSNPVDILTYTALKFSGYPENRVLGSGTVLDTARLKYALGEHLSVDSRSVHSFIIGEHGDSEIAVWSSANVAGVPLDQFCEMRGHYNHETAMKEIAESVKNSAYEIIAKKHATYYGIAMSVKRICECIMRNEKSVMPVSSMMHGEYGIEGMCLSMPAVVSSEGVETHVPITMNEEETKKLQESAATLKEIIEDIKLMKKMKKFSALLLTAAMTLSMAACGNSSAGTSTTEAASNASESTAETQTDTASSEAAESTASNGDLEDFSIVLDWYPNAVHSFIYTAIEKGYYAEEGLNVHVQFPANTNDAITMTAAGQADAGLYYQPNIISTATNQDVPVRILGTIVQHPLNIVMSMKSSNITCAKDLKGKIIGYPGTVDNEYFVKAMMEHNGLSYDDVTMQDVGFDLNTSLISGNVDAVIGTYINHEYPALQKEGYDVTYFDITKEGCPDYEELVLVTGENQVKNESDKLARFIRASRKGFQDVLDDPQGCLQILLNNQDKANYPLDSEVEEKSMEILLPLMADNSADFLTINKESWQNTADWLLKMGIITKAADIDALVTDIPQMDINKIKELAEGYLQEQVDLLMRFTSVDSESNYVEGNRQVIDMARAVLETIPGVTMEEMFFEGCGTHLIARIKPEHPEGKIILNSHMDTVFPVGYAAKFPPYVDEDNWLHGLGSGDCKAGFAVSAYAVKIASELGLLPNKEIVMLYSCDEEIGSITSRKVFEKEAPGTECAYIFESAAKTDKGYGVVSQRKGVILGALDIKGVEAHAGGAYMAGHSAVKELAHKILKLYSFNDYDREIYYNVAPISGGRPNGIVAGDAHMEFCVAGLPDNGPSFAEAEANIESLAASNEDPVCETTVSHRILFPALEKNEMGHKAFQIAEKAGQLLGITMEEIAEPTATDANWFYSFGVPAVDAFGPVESGMHTTEEKVYIPTITEKTALFAAMLGIMKEEQMRKYLPPLILFFLLLIGWQALALGINAAYILPTPIQVIQKLWELREPLFMVHLPATMSVTFIGLGISVVLGLALAIAMDMHEGIRRTLYPLVIASQTIPTTAIAPLFVLWFGYSIWSKVLVTVLMTFFPITITVYDGFQSTKREMEELMLSFNASKMDIFMKLKLPNALPYFFSAIKMAIPISIIGAAIGEWLGAQSGLGYFSKRMLTQLDGAGVFAPIVLLSAVAMLIVAIVGIIERIAIPWRKELMLEFQHVTFQYDSEDFNIIDDLSFTVEPEEFISIIGISGCGKSTIFKLTNGLLKRKSGNILLNGQDIASVKHAAGYMPQKDLLFPWRTIEKNLCLPMEIAKVPQSEQTQRVSDILKEVGLSDYAAKYPKDLSGGMRQRISFARTLLTDADLLLLDEPFSALDALTRISMQEWLLKQWQHFHKTIMFITHDVEEAIFMSSKIYLVKQTPIHELEVLKVPMDYPRNRNDMGRPEIVELKEYLIDQLRKQVIIMKLTEILYEDVKEIWDDYLKHPFVSGIGDGSLSLERFRFYMLQDYLYLYDYARVYALGIVKSREPEMMQFFSQLVNDTLNGEMDIHRGYMARLGITPEEVANVKPSIMNTSYTHYMLEVGHNEGILELLVSILSCSWSYQMIGEALNQIPGAADHPFYGDWIKGYVSEEYVACNQSILDTVDRLGEHCSEADIAHLKDIFRTCSRYEAFFWDMAWNMTLMLTYALMQALLKAGVSFAIIIKCLEMVCYETFDEWLSAAKKMNLDYYKTFYYVALSKNFTKAAELLGNNQPNVTRSMNNLEAELGCRLFARSNRGVSLTPIGEELFQYVSAAMNNLEQGEEEIKKTLNIENGLVTIGSSETALRLMLLERLGSFHEEHPKIHFRISSYSTPQTIQALKEGKIDFAVISTPVDIKKPLHKTPLMTFQDVLIGGSKYRELASKTRSLNELMSYPFVSLPPETGTRMFYTQYFMNQHLSFHPEIEVAATDQIRLMVRYNLGIGFCPDDLAADYIARGEVCQIHLQEEIPKRQICLVTDESKVLSSAARKLRDALAADASYRPFFCDCMSDMYNLRIIAADRVFYEGPCLSLIVPAFDGEKEVLAHHESMVIAVTDGEMRYKTEDGTWHIGYVGRGFVQIANNRVILLTESAEKPEEIDVRRAEEAKERALEQLRQKQSIQEYYHSSASLARAMARLKTSRQTAGKIRIMKKGKIVQVMGPVVDVEFEDDDLPYIKDALEVDNNGQKCIMEVSQHIGNHTVRCVMLSASEGLYRDMEVIAPGGGIKVPVGEQTLGRLFNVTGETIDGGEELKDVEKWSIHRDPPAFEDQNPVAEVLETGIKVIDLLAPYARGGKIGLFGGAGVGKTVLIQELIRNIAAEQGGYSIFTGVGERSREGNDLWSEMKASGVLEKTALVFGQMNEPPGARMRVAETGLTMAEYFRDQEHRNVLLFIDNIFRFSQAGSEVSALLGRMPSAVGYQPTLATEMGELQERIASTKNGAVTSVQAVYVPADDLTDPAPATTFAHLDATTVLSRKIVEQGIYPAVDPLESSSRILEPDIVGEEHYEVARKVQEILQSYKDLQDIIAILGMEELSDEDKITVYRARKIQKFLSQPFHVAENFTGIKGVYVPIEETIRGFKAIISGEMDDYPENAFFNVGTIDDVKRAAEKMQASVKMANAREIRDRMRSIQDTMKITNAMYMISSSKLRRAKKALANTEPYFYTLQSTMSRILRHLPEMHSEYFRDPNAAIDENTIRRAYVVVTADKGMAGAYNHNILKLAEEHIQNDKNAKLYVIGEIGRHYFQQKKIPIAHQFHYTIQNPTLSRARNISETLIDAYRTKKVDEIYLIYTSMKNAMTEEAQFMRLLPLERPDFMIKDIPVDLPMEHIAMKPSPEAVMGQIVPDYIVGYIYSALVEAYASEQNARLMAMQAAADNASAILQELGTLYNRARQAAITQEITEVIAGAKAQKKGKNMSVISADDIISIIKNEIENYDWDNEAKETGEVIWVGDGIATVYGIDHAMYGEIVVFDGGVKGMVQNIRRNEIGCILFGHDESIREGCKVIRTGKRAGIPVGDAFKGRVVNALGEPIDGKGDIASTEYRAIEEPAPAIIDRQPVDTPLETGILSIDSMFPIGRGQRELIIGDRQTGKTSIAEDTIINQKGKGVVCVYVAIGQKASTVARVVNNLEKHGAMEYTIVLASMASDSSSLQYIAPYAGTALAEYFMYKGQDALIVYDDLSKHAVAYRAISLLLERSPGREAYPGDVFYLHSRLLERASRLSEKLGGGSLTALPIIETQAGDLSAYIPTNVISITDGQIFLESHLFFSGMRPAVSVGLSVSRVGGAAQTSAMKKASGSIRIDLAQYREMEVFTQFASDLDDITKQQLKHGHALLELLKQPLGKPLQLNQQVITLHLANKGYFDDVELKSVKKFQNDLLAWFDLQHADICEAIQTGGQLTDELKKQIDEAAEAFKQQMVLYELGITSEELQTAREITEKVPALLNVLRSPLVTSEKKHHLIERVFDGSGLPRHLINFYKVMCNDGGIEELADIYAEWQKIWDTSHNRVQVECVFAETPSPEKENEIKAFLSRKYPGKELIYQISINPSLLGGVRIRIGNEEYDWTFAARIRQLKDAVGQIMLSLEPWTIFWTVVNVLVLFVALRHFLIKPVMGVIEQRNEMIRQQFDAAQKTQDEANKMKTDYEQQLDTAKEQAADIIAAARVRSEKEHSKAIADTEAERVKMLAQAREDIEKEQANAKKELQSQIMDIAMLAAKKIIMTGDQYDAKSGKMSATLFVAIGAGIAVLTGIGAGVGIGKATSSAVDAIARQPEAESKISKSLLLGCALAEATAIYGFVIALLIILFLKMDELVKNLMEELNCDTAFTIPIFGGIPVAESVFVTWLIMAVVILLCAIFVRNLKVTNPGKGQLLLETAVSGIYSFFEDILGEKGKRFIPYLMSVGIYIGIANLIGILGFKPPTKDINVTASLAILSIILIELSGVLAKGGRGWLKSFAEPMVVILPINILEIFIRPLSLCMRLFGNVLGSFVIMELLKMVVPAILPAVFSCYFDIFDGLIQAYVFVFLTALFIKEAIDMIKGTITSINISKEKGVVKTPVDTAICKCDHGIVGDAHAGNWHRQISLLAQESIDIMTEMGVEDLTPGQFAENLTTKDICLYELPVGTRLQIGETIQEVTQIGKECHKGCAIQQKVGKCIMPTQGIFTKVIKEGTIHIGDTISVLMPLTHINDQGRARMVDVSEKAITHRIAVAAGSIYMQPETLQAIIDGQIKKGDVLAVAQVAGIMAAKQTSAIIPMCHPLMLSGIDIHFETDTEENAVHIKASVKTTGQTGVEMEALHAVSAAALTIYDMCKAIDRGMHITNLRVIEKDGGKSGHFTQQMAKIDIISGFLGAGKTTLIKKLLSEALKGQQVVLIENEFGEIGIDGGFLKDAGVNITEMNSGCICCSLVGDFGTALKDVITKFNPDRIIIEPSGVGKLSDVIKAVQGVAEDAPIELNSLVTVADANKCKMYMKNFGEFYNNQVESAHTIVLSRTQNMKQDKLEACVAMIREHNKDAAVITTPWDELTGEQLLAAMEKPVSLADMVMAEEDICPVCGGHHDHDHDDHDHEHEHEHHHDHDDHDHEHEHHHDHDDHDHEHEHHHDHDDHDHEHEHHHDHDHDDHCGCGHDHDHDHHHHHHADEVFTSWGKETPRKYTKEEVETILKALSADNNEYGIILRAKGMLPSQDGTWIYFDMVPEEYEIREGQPEYTGRLCVIGSKIDEAKLEKLFMLMSLFLKDEAYEQLVQMIDDGKFEYDKKYSLNQIAIELNMSKTPVRDAIQKLADEKRIDILPSRGIQLHMPTADEVKQHYHFSNAIEGYCVAELAKAYAKNPKNIYVRRLKYIMQDMKAYLDEQTDFGEYFALDRQFHIELIDSLQDPYFSSLKSSGMGFLNHPELQLNEKVPRQDVYACHEKILDAICKGNHSAAFDAMMEHAQLMTNQLMALNYLYKMTSTKIKELQPKCNLAFIPLGPTEVHGPHLPLMTDFRSGLELCERAAKKLQEEGIESIIATPVTYCAADVTNVFPGNTSLRVETVEMLLEDICLSLARSGFYNIMVVSGHADPGNAAAVVRGIENAKKKNNKVNGTYSAWFDKGVVEGGAAAYFNGIHPTYDLHAGESETGFGLMRYPELLDKAQIASLKPNYEGEFLFERIGAGAKDFIECGAPDAYFGDPAAATAENADKQYDVFSDYVVDEVRALLGMSIMNEKKFGRILETGMGFIMSWVLNTSAMYLLGAPMTPATVFPAWVGAFAIAVAINYFAPVMDWVASWTKRIKNKTLEYVVRVLIFSFIEILFNSVWCMYNSGNIVYWPAKFPILLAVGTIAIFISLPIMVRVATACAKKMDKLEVPVYLITGFLESGKTSFLQEIFESGEFADGERGLLISCEEGEVELDEKATLACKIDTVTLDEEEELTADFLENCKNVYKPKRVFVEYNGMWDPDTILSVDMPRGWEIYQIVTMIDASTFAVYLNNMKSIIGNMIKCTELVIFNRCSEEQDLPMFRRNLKALNSNVQMMFEHKDGRMIELGKDIPPYDLNAPIIDITDDDYGIWYMDAADDKDRYEGKTVRFTARIMKNRKLPKNFCVPGRKAMTCCAEDIRFIGFLCKYPELDNLKNGDWVTLTANMHYERRREYGGVGPVLYATEVVECAAPEDELVYFNMAINMEEKIVFCKGGGCTAKLGAGVLSRVLEKLPRGEQDPSLLVGYDSRDDAAVYKISDDTAIVQTLDFFPPMVDDPYTFGQIAAANALSDIYAMGGEVKTALNIVCFPEKMDLNILGEIMRGGSEKVIEAGGTLAGGHSIADSDVKYGLSVMGVIHPDRVLANNQGQPGDKLILTKKLGVGIICTANRVGEASEAAMHEAIRSMTTLNKYASEICRKYDVHACTDVTGFSFLGHLHEMLDGKLNCCIDASEVPVIEEAHRHANEFLLTAAGQRNRNHTGPFVEFRNIPFSMEEILFDPQTSGGLLAAVKAEQAEALEAELQNAGLPAKIVGTLLEKNSEAPEIVVEMLKVINAMGDACPIPVVKTKNAIKELSGAGMVETLVDNEIAVQNLTKMAQQKNYGVRSEKLGENQYRVIMTIGESADEAGVEADEEVRTEETCIPDGRKGNKVVVISSSYMGSGDDELGAVLMKGFIYALSQQDELPKTILFYNGGAKLTCEEAPTLEDLMSLEANGVEILTCGTCLNHYGLTEKLKVGGVTNMYVITEKMMQADLIIKPMRQKKNYMILTFKTTTAAMAMEKKCSEEGIPGRLIPLPGEISAGCGLSWRILPEEYETYKDKIMSLDIPVEQTVEVRIMPTFNQLVRKGRQTVEKKSTAPALQKSYNSLHKKATDLSSPQKRGVCTAVKTATPKKPNSALRKIARVRLSNGIEVTSYIPGEGHNLQEHSVVLIRGGRVKDLPGTRYHIIRGTLDTAGVAKRRQARSKYGAKRPKDAKKMPRKGHIQKRDVLADPIYNSKVVTKLVNNIMLDGKKGVAQKIVYGAFNRISEKTGKEALEVFEEAMNNIMPVLEVKARRIGGATYQVPIEVRPERRQALALRWLTVYSRKRGEKTQEERLANEIMDAANNTGAAVKKKEDMHKMAEANKAFAHYRWMAGREYPLERTRNIGIMAHIDAGKTTTTERILYYTGINYKIGDTHDGTATMDWMAQEQERGITITSAATTCHWTLQDHCKPKAGALEHRINIIDTPGHVDFTVEVERSLRVLDGAVGVFCAKGGVEPQSENVWRQADTYNVPRMAFINKMDILGADFYSAVEQIKTRLGKNAICIQLPIGKEDEFKGIIDLFEMQAYIYNDEKGDDISIVDIPEDMVDDAELYHTELVEKICELDDDLMMAYLEGEEPSNDQLKAVLRKATCECTAVPVCCGTAYRNKGVQKLLDAIIEYMPSPLDIPPIKGVDMDGNDVVRHSSDEEPFSALAFKIMTDPFVGKLAFFRVYSGTLNSGSYTLNATKGKKERVGRILQMHANKRKELDKVYSGDIAAAVGFKFTTTGDTICDEQHPVILESMEFPEPVIELAIEPKTKAGQGKMGEALAKLAEEDPTFRAHTDQETGQTIIAGMGELHLEIIVDRLLREFKVEANVGAPQVAYKETFTKAVDVDSKYAKQSGGRGQYGHCKVHFEPMDANGEELFKFDSTVVGGAIPKEYIPAVGEGIEEAAKAGILGGFPVLGIHATVYDGSYHEVDSSEMAFHIAGSMAFKEAMHKAGAVLLEPIMKVEVTMPEEYMGDIIGDLNSRRGRIEGMEDIGGGKMVKAYVPLAEMFGYSTDLRSRTQGRGNYSMFFEKYEPVPKSIQEKVLNNKDKMAKAKFDRSKPHCNIGTIGHVDHGKTTLTAAITRVLAERVPGNEKVDFENIDKAPEERERGITISTAHVEYQTAKRHYAHVDCPGHADYVKNMITGAAQMDGAILVVAATDGVMAQTKEHILLSRQVGVPYIVVFMNKCDMVDDEELLELVEMEITEVLEEYDFTDCPIIKGSALKALEDPNGEWGDKIMELMDTVDSYIPDPQRDTDKPFLMPVEDVFSITGRGTVATGRVERGVLHLSDEVEIVGVKEETRKVVVTGIEMFRKLLDEAQAGDNIGCLLRGVQRNEIERGQVLAKPGTVHPHKKFTAQVYVLTKDEGGRHTPFFNNYRPQFYFRTTDITGVITLPEGTEMCMPGDNVEMTIELIHPIAMEQGLTFAIREGGRTVGSGRVATIIEMTKSFENDSDTNHGLNSHRKPEDASFMREAIRLSQLAVEHGNEPFGAVLVKNGKIVFTNENQIYTRHDPTFHGEAGLIREFCAKTSITDLHDYTLYSSCEPCFMCSGAMVWVKLGRLVYGASNSDLEAILGNEGCNCSKIVFDNSFWQPQVTAGILRDESLMILKDYFDTHAKGMKQLVYSIKPEEVCQQLFSFVFKFLFDLMKNLLFRVVLADSLYMISSNVDTSIKFGSLGTGGYRYKVTAKTSAGTTTLVNSAFMVLGSGRTVANGTYYIESMKNNGYGLNVSGNSSASGAMDQMDHNAHSVYLMYYHLIMVVKYRRKVIMIHLVYKIRIRRQESQKSDSYWQEFEYDGSKNSSVATVLKELNSRTPLKDNSGNIVTPISWECSCMVRKCGACAMLINERPRLACSTFLHTLKGSTITLEPLSKFPLVRDLIVDRSNLFENLKKLNLWLESEAYMSSRTHEPRYQSARCLMCGCCLEVCPNFSANRTFAGTVAAVNAFRILNEEQESTHLNEISAEYKKKFFEGCGKSLSCHDICPIGLPVEELLVRSNAAAVWGKMSKTIIIIGAGLAGLSAALQAAENGCNVKLVSSLPSERAQSVMAEGGINAALNTKDENDSPEEHFTDTIKAACGLADPNAVWGMTQAAPELVHWLLKLGVKFNMSGYDDVDLRNFGGQKKKRTAFAQSDTGKQIMTAMIDAVRRKEASGMVERFSHHSFLTLRLCGNICCGCVIRDEYSQETVELPGDAVIVATGGMHGLFGNTTGSLSNTGEVTAELFRLGVPLANGEMIQYHPTTVKCGGKRMLISEAARGEGGRLFAMKDGKQWYFMEEKYPELGNLMPRDITAREIWKVSHESEVFLDMTEISEEIISNKLSGLADDCMTYLHKDIRKEPVSVLPGIHYFMGGILVDEQHRTPIQNLYAAGECCAQYHGANRLGGNSLLGALYGGRVAAKSACEQADVVELSCATQIDVPPASQISEIKQLNKVMQETMGVVRNENTLLNGIQTVQALTGNLPLLGMAVLKSALARKESRGAHWREDYPKSNDDDYLKTTVARFDGKQIQISFVPVPERQMRKWNTILSVLMLLIFMIHGIMGSFMLNGVGSSAGKLLAWIGVGILVVHTVIGVILTVQSLQTAKQSGKMYLKQNVIFWARRASGMAILILLLFHIGLFGKVQNGTYILFPFTTVKMVTQLLFVAAIFVHIFINIRPLLVSLGIISYKERRSDIYLILSVLLLFIAGAVILYYIGWQYLMKRKLILLVVTIVFLVGFGVILHSPPSMIDAVTGATPKSKKVAQASAQLEGSYVLGINMMSDGLDNENARNKLKELALDDSETNETDLMKTDISFRLYVPETDYPLVSYAKKLCDRLKQAGFFVDLKEYSNTMMLSRVVSGKYDVFLASDDFIDVTTLTQMDYMIMDREEMRMKRIFLLKGLDCPNCSAKIEKEVGELDGVQSSVVNLMKQTLTINVAQTSADTIASQIETIVHSHEPDVEVSEIVQESYIPEKKQEANESYNNEDKKLTVRLAIGAAIYAIGMALTVFAKVPLPIELAFLIVSYVILGGDVVWQAVRNISKGRVFDEHFLMSVSTIGAFVIGEYPEAVAVMLFYQVGEFFQSLAVKRSRKSISDLMDIRPDSATVRRNGELITISPENVSIGEIIIVKPGEKIPLDGVVLDGDSMLDTRALTGESVPRSVHKGDEALSGCMNQTGVLMIKITKAFGESTASKIIDLVENASSRKAPTENFITTFARYYTPVVVILAAFLAILPPIILGGGWTEWIRRGFVFLVVSCPCALVISIPLTFFGGIGAASKRGVLVKGSNYLEALNNVSVIVFDKTGTLTKGVFNVTDILPTNGFSKEQVLEYAAEAESFSNHPIAKSILAAYEKEIDQSVISDYKEISGYGISVMAGKKKVFAGNTKLMDTECIEYTTCEKAGTKVYLAVDGQYAGCILITDEVKPDSKKAISDLKHIGVEKTVMLTGDDEKIGKSVAEELQLDKYYAQLFPDQKVEKVELLDSKKRPGSKLAFVGDGINDAPVLARADVGIAMGGLGSDAAIEAADVVLMTDEPSKLVDAIEVAKATKQIVMQNIVIALGIKSVFLILGALGIAGMWEAVFGDVGVTIIAVLNAMRILKKMSKTSYICNCDVIHEDIVNDVKSKMQPKDDYIQLASLFKLFGDGTRVQILHALEQSEMCVCDLAVLLGVTKSAISHQLKALRLANLVKFRKEAQIVYYSLADDHVKEIIDKGFEHLWQKMKVPENSREKVKNLLKDANENGVKLSHQAPTLYDIVQKEEIAEFEELMRKTIADIVSEASSVACWVYVQKRAGFNCKIYGELTSAYMSENNDYIQLPPLKKDTPSDVVVHESTGEFKRKSMTVQTYAVVRGILGFIFTLLIIATAYCYHDWVQVAFLFSLSVILYLILFAGVFVDTVLDMTRERIIDFIISMNGILIREVETKNIMTKSSLPVGGYSVNPYVGCTHACKYCYASFMKRFTGHKEEWGTFLDVKHWPEIKNPKKYAGQRVVIGSVTDGYNPQEEQFGNTRKLLEQLIGSDADILICTKSDLVVRDIDLLKKLGRVTVSWSINTLDENFKNDMDSASSIEHRIAAMKQVYEAGIRTVCFVSPVFPGITDFEAIFERVKNQCDLFWLENLNLRGGFKKTIMDYIAGKYPDLVPLYDEIYNKHNRSYFEALEVKAEKMAKKYDCAFVDNEMPYGRVPQGHPVIVDYFYHEETRGTENTGKRNRMSICIKNQIQNMNLVIGCTVGCAYCYARNNVKRWHMIDDFTDPEFFPGKLRMMEKKRPQNFLLTGMSDLSGWKPEWRDEVFAKIRENTQHQFLFLTKRPDSLDFDTDLENAWFGVTVTRKAERWRIDALRKNVRAKHYHVTFEPLFDDPGTVDLSGINWIVVGTMTGAQSRKIHTEPEWAWSLTGQAHKLGIPVFMKEDLVPIIGDENMIQEMPEEFNKVLEVQKSWKKMEMNGGFLVTKIKQLGDRIFEKILSEKNIDAFNGAQGRILYVLWQEDGISIRSLSVKCGLAITSLTTMLERMENQGLISRVQSETDKRKTLLFLTEKAHALKGEYDSVSDEMGSIYYKGFSEEEITRFEECLDRIRKNLEEWQKSMRAKEELPECPVATAVSLIGGKWKLLILRNLKERPWRFNELQRSIDGISQKVLTDSLRQMMSDGLAYRHDYHEQPPRVEYGLTELGTKMLPIVNSLADFGNYYKSIIEQNMANYTKTTIGKENRIELHEKLSLTGAEISLNKLPAGANVPFVHSHKENEEIYGILSGNGKAIIDGEEISLSTGDWLKIAPTAKRQFFASDISGITYICIQVKENSLEHFTAEDAVIGMKGIKIELLGIAIIPLGIAVTTNNFWGYVLGVLGFGVAVIDCFLKDNHMRTISKIAFSNDKRNRTRSVLIMTAICLTTMLLVIISTIGNGLILLQKDQSASSYGSNYGLFIAADGTQLKEVERRAEISDIGIMCTEGILKGNENGGFVSADETVRKMLPYNQEYVLKEGTYPEKAQEIAAGRAFFDAVGYHDVKVGDTVTLEYRSGMQSEYAPVEFTVSGILYDRDEYTIEASYVVFGSQDFYNERVAEGDRQYNIYFTLSDSANVSMNNVAPVIKEIADSCGIDQKNVIINDLYLQWVLQPSYEMIVVCGTLILGIVLFSVVVIYNIFQVGIAQKVQEYGKIKALGATRKQMKQLIFREGILLAVPSIPLGLLFGFLIAKVSFNWLVEQGNLVSTGTGSMGVQNQQVPLFSLPVMLLCIFVSFLTVALALRKPMKIVSRISPIEATRYLENAETQKKGKRNGRKNVTVFSMAMANVTGNPKRTIGTILTMGFSCVLFVIISNYVGNIDTEHEARLSVNHGQFELQLDYSAEYDERYPENNLDTILTDDPLNDSLIEEIKSIPGVTDVMTREIVSVNLNGTRFPATIVSKKDFDFMRQEGDIGSMDYDQAVKNGDIFFGWSTWMEQDGYAPGESIAFDFENGSGTYTYQGKIAGSFVSADTYLVIPEGVYRSMNPRGTAYGYLWVDCDKKDVASVEQSLNTLISNTSHIKMDTYHAQLQSAEFASSMMKLGCYLFMAIVGLIGFMNMANTMIMNITTKKQEYGILQAVGMTNKQLNLCLQLQGLIFTVGTICVALIIGLPLGYALFSYAKHNGIFGMNIYHVPIVPIFIMIFLVGLLQIVLSFVLSSNLKKETLVERIRYDGMTAKKYGQTIVMITHDDEIAQVADRILVIEDGQVVDFNMEYFMGETFDKEKNKPYKKLDAAEKAAEKVKAAVFDENGEVVKDFREKVETPAEPPQTATDGSQEQQATNSADQTDQEKKTDAETDQADQEQQQATMTDTVPEGALDTDADGNVPTFDADGNQVGTATTEEIKAAEEAVTENIDGMTAVRIKGKIRRVFNGSLRIRKAPSWSNDAVRGAAAFTEKIVTHVMEVDGKPMYKTLDGYFISGDPKLVEYIEEMGTLCGWASIDENGKATGGQKGDQTGREVKTGNWYDFGQTVVLRFKDRNKAAKAATAMKQLCANDNVGYCQGHRTSLYTELEKVGWNPTALKTPCETDCSAMMSPVLKCAGISVSKDIYTGNMVNAIMATGEFEKLTGSKYTDTGDNLMTGDISVAAGKHTIMALENGCNVSGGNGSGSGSGNNPAVPYGTAKTATFTGYVNTGALNVRKQPDPDADKLVSYPCIKQNTEVGVCGSAKAPNGALWYYIYIDGAKGKKYGYVNARYITAKMLHAYITSYAICFMATVVIIMLLLIAGVEIDKEEAKHHGAEVEPPPTAKDWIGYILKAFLIAFVVSLAAPLVLIFYIFVIGCIIISALTEEMKNAALILKTIYDNLPMILTIIAIVAGIGIKVRNFLKQSKEDQKKQLQEQADKVVELVKESLLSIVSKAEKEWGSGTGTIKKSWVWEQLQAQQQKLTEYISEGLIDKDMVDDLIEAAVEELNAILKKNQKAAEAVKPPEEREAAAVAAALQAQKIKTEMEKYSYTIPASRRKKRRKKSLTSWIMEFSKKVVVVCVLLYIIIELFSVIAIWHFADTSVLTTLISETSEVLRMGVFGYMIKAGIENWQKIKKGKQESENEEGGANGMTIEVSLLLSGVSIAFAIFFGISTRNRNVKKDTQDEAREDATILTKLENIQNTMIEVKSEMGSYRNEMKEIREYYIRASESLKQLHKRVDRIDKIIDESHPHQYIEEMTQIELIDRLCAVNTLLTDIVREQAEIMAQHGIEAIQTQDEATDRLDDLFGKRKRAEDENDAIEAALRNYIMAETSTGTNTETTEKVHSKKFDSLKKKWEMDYITKDTLKGWVALNEKRAGKGITAEEYKEITGEEYEASEEMTQEEYARLQAELESPATKMIMQSMSSIEMNVAMMQEMMEVMKTYKHIFEELLKEENITQCFHDAAKRKTTRPEVARVLKEEREVGNDRPEPQCLQEHVKALQKMLEEETYQPPEHKKMLINEYSCGKVREIIKPEFQYEQVVHHCIIKQLQPIVLHGLYEHALGSIPNRGCHSGKKQVEKWIKAYKGKKFYILKADVGHCFDTEDIRVIETKLKRVIKDERFVRLCSTVMEHEATMKPPEFDREWIEDEQWKDTEFLSGLPLGFVTSQWFTQLNYKELDHKIVEEWKELGGVDHSIRYADDIVAFGRNKKKLHRLKDVMSEYMKNEMHQKIKYNWQVFRFEYPDRKAPPVIDKKTGKEKPKTRGRALDFMGFVFHYNRTTLRKSILKRATKKAHRIAKKEKVNWYDASAMLASMGWFTHTDTYGFYEDHIKPYVNIKQLKKKVSKHSKKGVKNNDVRMVSVRKYGQADRVGHDIKPDSGLSAKEHRRADQEGHMARLYVADKETLDAVKADTTGILAQLQDKDGKFSNVKRYGIKINKADSNPDTRITYLYDAAGFTPAKMNFTDGSFDFGSWGEVFFIKQNRPVMLKADRTVAYELNHTDHSKKLDGTASDVGDASTTLNAMSEFPLIWLCQYEVGNYEYTIVSDTRVDSNYNADAYTREDGSIADHMYMPMYGGSYDGAKLRSLSGKKLDCNTNAQTEISRAAANGTGWTIISWSRRNLIESLLTLISKSENFQAKFGQGVCSTYVNDSSKDYGKVVTGTLDTKGQFFGYNDGTHEVKVFYCEKPWGNRWDRLVGYICDNGTIKVKMSPPYNLTGKDYIKVGTACKTEGWQKDTLMTRYGRFVKSVGGSASTYRCCYYWINVTIVAVALVGGNTSDGASCGAYVLLDNAASGAGWYVGGSPSCEEPLAAMATWTVKPKKDTTANWKASGRILEVNEWGVEETTSGKYILRIGNGKDKFLDLPAVVDTPTLETMYNTIRNFNNNMQQATSAANAAAQSAQQQAAAAQAGAAACKDIQKGINSMSDSATGKKYTIGVEAGLVYLEETTMAMQLITDITLELTGDERLYMASAKQGDKRTRFIRIALTNNGKVFTIPTGYIVIANIKKPDKHFCYNECTVTDNKVMVELTNQALAAAGTAHCDIEIRDAQNVYVLSSQAFTIEIEETNRNDAAIESCNEITALEKKVQQYIDNIVSTKNDILSVEAAMKVAEAARASAEVDRINAEARRKKSEQDRETAETARQQQLQIMQEATGAANNAASSANTAAGAANTAAARAEATYKSQEELQKMYEKMLDIKGAVGSTIDGGTAFSIDPMTCDGGTAFTAEECEADAGTVMKPIEQRIACAKGEILNAMATISTEHDLSATVMEGVLADILSEVKSQSKMELLNAYNKEVNDAQQEIKQLKEELEKAKAASKKTLKTEPDTDQEGGGDNGDAANNMSKEIIIEEDTKTETKEMILDLPEGERGITEEETETKEQQIKNTMLAQMDSKLDLILAYQEAALEMQIFNDKKERVGILKGFKDRKIVKTLNSGDKELIFKYPSDGKQVDLLKEEYYIRTKEDEYVIRKRKTGTQFNEYTAQLNVEELEGAVFPYGFESKEQTIRACLEFAFEGTGWKVGTCQITKKRTINKDEETNAWKVLQDCLSTYRVECKINSLTKTIDIYEQIGADRGRYFIEGLNLKKLTVTSDTYDFYTRLIPLGKDGIGIEWLGKPYLENYQYSSKIKTYVWSDERYTNTTSLIEDGIAKLDEMSKPYVAYTADVIDLARQSEKYSSVFDFDIGDTVWMISKKTRTKEKQRIVKLTEYPEAPRSNTVELSNATKTFAEVQQEATDQAKSEAIKIANSSAKKVLEDGYYTKTEVETHITASKEEIKLGVSKTYETKTIVDQKIKSVNDLTDEKLTEYSTTEQMQAAINLKAEEIDLEVSKVYETKTSVTEKIKSVNDLTDEKLTLYSTTEEMNAAIKVQAEAIDLSVSKTYETKTTVTEKIKSANELAQSAADTAEENANDETDKKLKEYSTTKEMNAAIKLQADSITTEVNKKVNNSEFGTKITQNAYNVRVAWNNNSKYIQLEYGQLAIYNGDVTAAEKRAVFDERGNHFYRDGYYVGKIGTNEWSGNNAHKGLVFDLDYQGKYMAFAQMKSQSAGSYTTMLCFSRANSIYDQYGIHLGCDFYGHWFDMYNVDLHDVNINGYGVADGKSIPIVTEIHDNGNGTVGWTTSSISVRGGMITAVPQGSANIMKVNGIDARKYNAKQLTAEVLPPSLAVDYEIVTGAFLPTEFETDMELGQLKLCMYFRGKDRNSLIRSMSAFLENFTKSSVVEVDGYKGKFKAYTASSDYSKMKVKTRYKLNIKLEGYFFDDELKLEYDGIAQTTIDRQGTRKAPAIIEVYAKKTLKNYKISGFEDDIIVEQLAAGQTIIIDGEEGRITNNGADAFASVDLWKFPAITQAQTVLKFSNTDAIVRIRYKPMWIMAQASIKIGASMSEYQSAMKAAVASMKELSSQYSLAAANAKLYGTKSDALKAKISELTQKMDVQKTKVADCKTHYETLTTRLDNNKKKSEELKTKVAELSRAYEESKEATGENSEETKKLKTELDKAEKQLATTEAQTTKYEAAVKKQGAAVTQAEADLANMEVQLRDVNAELARQKFDEYAEKAGKVGQAVQTAGQHMMKVTTAIGGVAAASVTVAANFEQQMSKVQAISGATAEETDKLTESARQWGRDTKYSATEAGEAFEYMALAGWKTDDMLEGIGGILNLAAASAMDLGTASDIVTDYLTAFGLSAKDAGKFADEMAYAMSHSNTTTEALGEAYKNCAATAASMGYSVEETTAVLMTMANAGVKGGEAGTALNAIMTRLATDTKGCATELAKYGVEVYDAQGNMNSLSSILTGVRGVWNNLTDEQQANLAKTIAGTNQFSALQTIMSGLSDEAIASGMSFSDYAEALQNCDGTASDMAATMQDNLLGRLTQLKSKLEDIGITVGNALLPFMEKAVAKIGELADKFAALSPQQQETILKIAGVVAAIGPLLTIVGKAISVSGQLSSGIGKVVGKLAAMGTTASGATGGMAVLKGALAAITSPVGIAVAAIAAITAVIVTLWNTNEDFRNKITEIWDRIKTVFTEFGQHITDKLNSLGFDFENFGEVVKAIWEGFCNLLAPIIEGVFNNIANVIETTLNVITGVFDLFVSLFTGDWSGAWDAVKGIFESVWNGLKEYISNILNTIKGVADAFLGLFGTSWDEVWNSIKTTFENIWNGIVSFFTGILDGIKNAVTTAWTAVSTTISDVLTGIWNTVSNIFTTIRDFVSTVFETIKNVITVVIMAIAEFFSAAFEILTVPFRFIWENCKDTIISVWDAISTKIQTAITFVQNIITTVWNAVSGVFTTVWTAISTTVSNVWNTISTKIQTTLQTIQNIITTVWNAVSGVFTTVWTAISTTVSNVVNSIKNTITNVFNAVKTTVSNIFNSVKSTVTSIWNSISSTISNVVNSIKNTVSNVFNTLKSTVSNVFNSIKSTATSVWNAIKNAITTPINAAKNAVHNAIEAIKSKFNFTWSLPKLKLPHPKITGSFSLNPPSVPHFSIDWYKNGGIMNDSMIFGMNGNKLLAGGEPETGGEAILPLKPFYQELNSILDEKLKNIESGTNVKVENHTYIDGEEVASKTYTKVDEQLVEDKRKGRMEKNNGDDVASAFQFNAAIMKMIFGISEREVLKADVAEQLATAKMIHFVMQDIITPKFLELNPNRPDEVDQEKSAFDDYDEENGYNEAEKQLDDENIWKVCRDNVDRVVKLCIKGLNDSLSNVMKSDIMSLLDHVAFEIKTINEKMKRKLIINGKEYEMPKMDVDTYMEYLEVRDDIMGTEKKSGLYTAEQFRKMLDCICMVYGNQFTVDELKDKETGLGVAAIIMEFALIEESLGDEVNGKVEKLQKNFTSGKMSEAGKQIIRSRTKSFRDIYVAPVTQNDATAYAAGTPVKLARAISGKVSDKFSVEKIYSDDGVEDTVETYEGTDVEFEVNSLAPQDKAMLFGHLYKNGWLVKNKDDKAPEVAVGYRAKKLNGKYEFVWLYVGTFGQGYDDNYQTQEDKVTTQTATLKGSFYERACDGNFETQVDESNLLTEHTDAAAAIKNWFGKVQEPTEAAMDIVKKTLDALEVLEAEGITVQQGWYDADIKGLHVTVWNLGDYGGEHSDDDEEVEIAAVQVCIWSSTDQIRLKKRIRRLMKKAGFAFMGANDNLETDTKIFMNAARFMAAEEAEQEDEEEMKVTFEFEGLKELQNKLETLASDSEIRKTNKQIFQRSVDYTEPRMKTVMARSADNSKSGKKGYRPSGHAADNIPTKVTTKGGEVGWTLLGDAENWFYMKFVEWGTTKQPPQDFLYNTMEECRGQWDTIADQEYQKLLNEKLGGMSSARIKIYKYQYGKVDGRRVETEPILYHECWCEIGSLYGKELYRAIEIRLEDAIVFDNVRYCKKVKEIAAHLKDYFVEYEGEKYNIFARDFRQNDKQYVQLKANRVTMELEELKAYCRIDYDDDDEVIKLIYAAVLEEMTDLIKDFNPEALTNRQKLLICMYVKEAYDNRDRTAPTDDKVRFAVQSMMLKERLKMSKEARALLKKINDKKNAIKSLVNEGKTKEAKEAKAELVDMQDRFNILMDLEDDEDEDIKDQIDKDEATKAEGKDKAPSKKDIARAFVNRIVCGMRKTKLNEKDQKIMDAMSEKSDEDGGFTVPQDIQTDIHELRRTDDDLEQYVNVEPVSTLSGSRVFEVDADSTPWDDVDEGEEFGEEETPKLKQIKYKIKKKGGILKVTRELLQDTAENILGFLNKWIAKKSRATRNAAILKKLAEITTGKEVAISGYDDLKDVFNVTLDPAIASSSIVLTNQSGFNYLDKIKDERGDYILQHDVTDKSKMLLFGVYPIKKVSNKVLKNVEVKSDGSNVSAYKYPIYMGDLKEAITLFDREKISIELSTEAGDLWAKDQTGIKVRDRFDVQAFDEEAVIKGEITVPVAGMNFTRRNRAKRTIENVGFMQIKDAAAGGVELYIYGDIVSSAWDKWTSEDTCPQDITDFLNGIDNNAELTVYFNSCGGDVFAGIGIYNILKRHKGHITGIVDGIAASIASVILMACDDIVVSTGAQIMIHKPLTMAWGNADDFAAVISQLDSCQQMITDIYMTKAKEGVTADQLEELINAETWMSESEASECRASDYFNIKVDESAEAVAACVGYMIDRFKHAPAGMKTETAEDIEARQQQADETEEILGDLYMYGIMNMWKTLNKGIMKAFGMNIETDTATLNDESFLEWVGIKRDSESKKPTSDVTYFTCLKMMSETVAKMPWKLYQKTNKGISEPIDNDIARLMKQRPNPFMTPTTFWNAVEMNRNHYGNAYVYVRRKFKRKKYGGEYKALDMWIMPSDRVQIIIDDKGIFAGKGKIWYMYSDEYSGEQYIFRTEDVLHFKTSHCLNGIVGLPVQYILKQTVEGVIESQRFLNNLYKNGLTAKAVLEYTGELNEDAATKLRQTFERFGAGSQNTGKILPVPLGMKLTPLDIKLTDSQFVELKKYSALQIAAAFGIKPNQINDYEKSSYSNSEMQQLSFYVDTMLFVLKQYEEEVNYKLLSDDEVEEGLYFKMNEKVLLRTDSKTQMEILKEGINNGIETVNEARRKLDLMDMEGGDVLIVNGTYVPLTKVGAAYDKAEEQDTEEDSDPDNPINEPNTEGGENTDQDEQEQETAETNEPDTDQEGGEDDGEENELHKKKSSEKNDMTTDRTTQYALDVLADKIVAGDLVKAACQRHIDDMKAAEAAPYRYYFDVEEAERIIDFAETLTIAEGEEEQPVTAYPFQCFILGSLNGWRTKDGHHRRFRTSYIQLGRQNGKSFLNGILAAYYGNFDKYKYGQVYCTATKKDQAMIVFNEIVKFINSDSDLSECFKIHEHNSTIDCKITHSKIKALSGDTKSIDGFRPYLGIVDEYHAHKDDQMYKLLEGGIKKMKSALISVITTAGFDLKSPCFALYEYCVKVLKGVASNDSQFIYIAQMNESDDMWTPENWIKANPILEYDRDALQNMIPIAATAKEMGGSTLRDFIVKQLNMWIQWTNDVYIKDMDVWTRAAVKKTLADFRGQKAYVGLDLSSGGDLTSIAIVIPFMQGEDKCYFVHAHSFIPKRRVEEHIKTDRVPYDLWIRQGLVEVTETMGGVKTDYKYIIAYLKKIVKLYELDVQWICYDPHNASAFLTDLEALGFDSIAVKQSARELNDPTVDFRLELEAGHVEHDGNEAMKWSIANAKTTSNSFGEIKIDKEYTTERIDIVDAIIDAWMMAMKGEIKPDVNRYLDIWFAGTEKLRQKGGAQGMAGQRQPIALVQAKGKKHLTKAEIEERQRTEVKAAADKVTAPQYLSPTQKRTFKKIVKELRAIDLISNLDVDALARLVIAQEKYIAVTQELNRQPIMVEIEIATKQLDEYGQPVKIRKEVVNGEVERLALLQDRYFKQCRQGAADFGLTVSSRCRLVVPKADKETPKENKFAKFAMLFHKCRCGALIPQNIDECEACAAKAAGQQSRHMEYNKHRRNKKTAAFYVSSEWRKTRAETIRRFDGVDIYAFYVLHVIQTADMVHHITPIEDDWNRRLDATNLIPLSNHSHGIIEALYSKDEQTKKATQKMLYDLIERHWKATGGVMQNSDETQQDMTEAIRIAVRKAFAEVKIEEKRAEKKKTLYNTRRLMESYIDLKKYINNAITEEEEVTEAAYSVLKGENAKLKSVKEAKMVTAMMIINIDRALTELETESRKEGTLYKYEAFRMHYIDGLTFEEIADQLDCGKNSPSNWCKAILKKMSVKLFGINGIMKLKEYATKIKNRLVGQRAKPQEEEKDDLSEKIAERTQELIAEDRQEAVRAAVVEEPEPEETTEQPKAERNISADVMKLAAVTRGLKIDPEWTKEETIKAVSEYSGLPEEEVEVLLESTAKWAQETGRKMVKSITEAFEKLKPAFEQVGKAITEAFRKTKWTGLQLRKELISNNRRKMKGMPMIRAKAIEKARRNERRKPKKMNKVILMGRLTRDVQTRYTEGAEPMAISRFTLAVDRRVQRDQEGQSADFISCVAFGKTGQFMEKYGQQGTKFVIEGRIQTGSYTNKEGRKIYTTEVVVESVEFAESKAAAGDNQSRPQPAPDSGDGFMNIPDGVDDLPFTMRSIWIEQAISNLGGIIVIILQLGFIAVLIALIILIVAEIIKAAVKGIKEQKGAKKNEMYEHFTRQQQQFDVRRGDVYYINNNRGQRGNEIRKDRPAVIVSADFLNKHSGDVVVVFLTSQPKKDMSTHVTIRTTGRVSEALCEQPTTVSVERLNNRIGSVTDREMQQIDIALQIALKLDAGADTKEYVENQSGGGITQRRYSGMNEIICNKCNAAFTPDMIEIQKKVITQDEHGDDVIEQYYECPICGAHYTITIMDRVQRIAVQKRRQYQTAIQNAIRARKPARAQTYKDKERELADDIQARAKMLKEKYGEYTEEMQDSKEVREMAKTFREAADVLDGMADFAENRKEMTKEEKESKEEELLGRFAAKMIKIQRFSMNGYAAAVRQFYDIYRPIARKYGLRMSSHTSIYDDGWIKIYDKQFEDVSEHEQEQCEENGQDCRTCPDLIADSKQAAAVAADYIDNPVMEFGAMNMKYALRSEDTEQINVISWASWQMQKYPELKWLHHIPNGGSRNRAEAIKLKQMGVKSGVSDLCLPYPKGIYCGLYIEMKYDKGRHQPSQKEFLTDMAAAGHYVATCYTARDAVEVLEKYLNLKCLQTHIHVSDSDTAVTETAERMKEQNNSVWKDGEVKPLKVMDNEKRLCLGQAVTKAEIYAVKVIEEELHRKGIAQDSIERKIIITRTADVLAAHREEVRDMYKKSRQLLAGWIVKMSGIEDLTAFRKMKRLGFTGDIMHDMKIMEEMRMRDAAHNFIRTAKNFIQRKPKTAAAFLITFITIYVAVMLGFAIGGMISTKGKTPTEQESEAEEQTESDLNADEEYPFNTMSQDWSGEDMEGFCYHEISDECKAAGGKFPVMAQIYTYIVCQNYGVDYEMVFALIERESECNWNASGDGGTSWGYMQIAQKWHKERMQRLNCTDLTNPYQNVTVGIDYLKEIQDSLQEVPEDVRPYYVLAVYNYGTKGAKENLWNHGVYKYSYNTAIMERAAQLKAEKERQETKEEMKRRKKAVYVDYDYEAAYQKMLTDLEEDNMCRMLNEGKVRSIYATKEIKAAEQMDIEIYPEFRRGQKEQIPDEAKLKKQRQAQRNLNEKNSRKECERTINANFTDNDIWGTLTYTDGNMPNSMKEAQHDMTLYIGRLNYERRKKGLAKLRYVYVTECSDKGRWHHHFVCDGDMGLEAVEEKWKKGRRNQVRRLQKDENGLSGMANYITKQKHPDKKGKEPKPVGKYQKAWKASKGLKKPEVHKNHYKFKQKDIDEVVTGRCDLEDKLKKWYAADGYKLTSYEVRYNNMNGRFYIYARMYKQPQEGEKIDKATSKIKQKTAKKKTKKKTVARCGTMNTPDARRIFEAIAMILSNRNDGVRVQLSEIKTKAAKASMSRPTKTCYDCKNACWDSVPYGSTTATMFGGCDKEDEMTEEEAERFGETEDCPFWENRYKEENAMANIDVMYSSKTDQWATPDDFFRELDQEFHFNLDPCANEQNHKCEKYFTKEDNGLSKDWGGYRVFCNPPYGRAITDWVEKAYREGTKDNTIVVMLIPARTDTRYFHDFIQHRSEIRFVKGRLKFGNSKQAAPFPSMVVIFRGAGMMIVGFEEHGFVVAAEHMPDTCTNCPFWLTDLEMQEDGMCFLTGEVIPTPERTCDTKVMGNCPILPLNRLKKKKTRKEKKQWRTMIDEKKVELMKKLQRLAERGVGGEKEGAQKKLQQLMKKYDIEESDLSDDKLEDHEWKYHNDFELRLLKQTIYKVLGKDGLNQMYHYRSGKGKKTIRGVQCTKAQAIQIGIEYEFYCETWKEEHDFFFKCFVQKHKIFPTKEEMIIRPQDDVEMSDEDAMRMQMAMSAMKDKSMTQRIEGMTLQEYEAQGGCEGCYFYGTIDVDGRKGCTFHWFDDESEDWEYSKNCDEISDMNTKQNLFTEEELAKVTDEAERKHLIECAQDQSKIDMKYMEIMSKYDLWEKGKRSRYFHATTHENAKKIMQDGVIRKGIDGGVYICKQPLEAARFVAIRGHETGTIFEVELEERKVVEAHDHNEAFFGCKAYMYMDDIPTQKIVKISRYSTEQEDDKEMAAVTNEKKNLNSQTEDVSEFIMLLKQMSDSDRMVIKGMMMWAAGENRPVKTAMNMIATVATKEKAWQLADKLFPTDYSRNEPDSLRAGYPIFNTTSTDSKYKGFHISDLNAALELNMGAETIRINISEYETKPALEKADKTVDREAEIKDNFDKLLQYVSDKRKSAELHERQKYNYYCDRQAGCWNWTKEQDEAYQKEWDDIIVQMHALKDLENAMNLARTKGIIMTNGERVNEVRKSLGLTLEKFGEKLGVTKTTISRIEKGVNNLTDQMAISICREYNVNYDYLMYGEGEMFDDLPQTIVDELCAQYDLNDFDKALVEMYVSLPAGSRERIKEYMKQLVKKVGWDKTEMNIICLDTETTGLNHYDDEILQLSIIDGSGAILFSEYVKPVHHECWTDAEKVNHISPSMVKGCKPLLYYAHTIQRILENADMIVGYNIHGFDLPFIFNSGIEYHAKENSIVVDVMLAFAEIYGQKRYNEYKWQKLKTCAEYYSYSEDSWHNALDDAKATLFCFYKIFGDVPEVPVYATGVYRSVDNIIKHEDQKPVEVVPIPKSGNILIGFGIFMLLGFFVAFNPVCIVIAAPLLYFGFKRHKAYKEFKQNKRKQMIRKRINTLLNKLSDAQLKRIYKYIKYVYIHGMEILTWQARTDRHLTLKQLEALTGISKSTLNTIENGITSPTLRQLEAIAAALDVKITDLFDSEYKMSFFTPNPQLFGLRVVKYIRCSHDDQVLHGDTLEAQDLILEDFIKVNRMILVDTFIDEALTARKRFNKRKEFVRLLNGVKAHDFDLIIFTKLDRWFRNIGDYHKIQEILEANGVQWKAVTENYDTTTTNGRLHINIRLSVAQDECDRDSDRIKDVFAYKLKNKTYVSGSLPRGLKLDAEKHVIIDPEWNCFALDMFDRFEATCSKRDTQLFLQEKYNIRVCYDTVARYLKNPLFKGQYRDDPDFCPATISPERFERIQKLAIRNVRIRHTQQFYIFSGLLICSSCNHYMCGTVTYRRMADGSEKMYKNYRCNFKAQSKLCDRGKTYREADLEEYMLAHIRPALSDYIAKYEVTAASTVQKNPVTEIAKIERKMKKLYDLFMDDLIDKEAYRSEYDKFKAQIEELQKCSTAAPMRSLDSVKKLLSEDWEAVYHTFSDREKNTFWKSFVESVLVYEDGSMDIRFLMSVILETKQLCKFYGAGENQVKAVNQVDIQIEQGEFVAIVGKSGSGKSTLLHMLGGLDTPTKGSVTLAGKDLYRMKEDALAVFRRRKIGFVFQAFNLVSSVNVWENIVLPLGLDGRKVDEAYVNDIIATLGIENRIYNLPNQLSGGQQQRVAIARALVNRPEIIFADEPTGGAMTKRYHKKITVVLSLVLPVILLFAILNCFTTYVFYEDYKYKINLMTEIAAKEEFSGLDAVSELLKDKDIETNEQGRRLLEQYGYWGNKGNAFYSQFRHQVMVTGAVSTVICVLLLTFLLYWKKKEDACHQKILDQLEEILIRFRENKFDDLLKTENHAELEKLNDQLEAIGHHIQLIKEEARAEKENTKEMVSDISHQLKTPVAALDTCFSVLMQNDLSATEQEEFRIRCRSALDGLETLLQSLLEISKMETGLIQINKKKLPLMDTVISAVNRTYPKADEKEIEFVFDYEKELETCTIMQDKRWLGEAVINVLDNAVKYSPCGSKIFIRLQKRNDLVRMEIEDQGIGIPQNEYHKIFQRFYRGSSKEVMEKSGTGIGLFLSREIIEKHAGTIMVTSGKKKKGSTFVIQLPYVGMPGILVVEDDENLNRGITFSLKKSGYEVFSAESVKKAKRIASDHNVDVTICDVNLPDGNGLEFVRWMRCNYNTYIICLTALDQEMDQVMGYEAGADDYITKPFSLSVLLLKIEAHFRRRQEKTEAGKMISGDIVFIAGEMKVLIKSREISLTKTELKMLTFFLQNPKQILSKTQILENVFDLEGDFVDENTIAVNIRRLREKIEDNPAAPVYIKNIRGLGYIWNQEVRQMGSFEEDKDIIKQNLECVTERPDAVFGIRMLMEDKCEMPDREMVQDVMDRHLGRSECFCYDAQVIGFSASQYSVHFAKENKDISPQLLIMGCKPITAPVMDGMEKSQTWDCPECDDILQQCTWQVAASDMMAAGLNYKERAEMLVQYVEALMELFPSCRAVVFDSSKKMFTREKLIRCRLPMESRFIYYAVNVRLFNIQGAEDMIVDSVGMSMLSLPDVQYHFHGVNPNAVVAHAYQILAYIFASGNPIKSGDSIDGFRGGHMDPSVQWRVQYENAMLPPARKLLDVNMGAYAAGVREMRMNETINAMPEYERLRADYEKRLQEVEQNYQKQLIQMADEAKRANMAKTDFLRRMSHDMRTPINAINGYVRIAGAFPDDQVKQQECRNKILTASGYLLEMIKSVLDMSKLESGEMTLEHKPFQMTALLDRVCRVIKVQAMEEGIDFNVDNEVLTHSCLIGSPAHIQQILMNLLNNAVKYNRRGGRVWLRCREIADRPDRSWFEFVCEDTGIGMSEAYQQHIFEPFSQESDGVKSKYDGTGLGLPITKRMIELMDGTIDFWSQKNVGTRFTVRLPLEIDIVSCHCDRAIHADETANLAGLRALLVEDNEMNMEIAEFLLKEQHMQVDRAWNGAQAVELFEQSETHAYDIVLMDIMMPVMDGLEAARRIRSLKREDAKTVPIFAMSANTFIDDIAKSREAGMDEHFTKPLDIEVIREAIGRYCGRGRVFMGVEEYIPDRIAGLSEKRGYTKYRLSQITGMTQTALGNILSQKSIPTIPTLERICDAFNITLAQFFSEDGSRLDLTDEQSEILEVWDGLDVKEKEILLSFIRSLKKMEIIAIPLIIFLLMIFVTSFFFTMKKRLVECLMLIILIAGSAALGYMLITGVITLPIMSQTLVTYFSASGVTANAAKILAQAAGADLYEIKPEVPYTRADLNWMEKKSRSTVEMNDPSSRPAINGKVEHMDQYQNIFIGFPIWWYREPSIIDTFLESYDFTGKRIILFATSGGSGLGKTDEGVKKIVPGAKVENGRMLNGNVSEADVKAWVQSLNLMIVTIIMILTDWLMVGVTKLVYSCKVAYRQGMLFGVHVPGDAAELPEVKTMIEKYQSWMKAFYRWHFAIGTVICLLGMWYMSIFFIAWTVWMTAFFIGVMGKVWQTHRHMYELKMQKGWYEATSEEEQVTSAVDTKTAARTAQMAVPMICHALPLIVLCGPLVIPGLWHAMAVNSESWIIFVCCLLVCGCLLGAALFYDKMGNKIYSEHSDINFQVNCLEKRMTSVGFLASSICNSMAFWPIAGALLSGKWMDWSWLGLYALFESAAGIVMVVLFFIIRRRKEALLKQDTAPMYIDDDYYWRNGWYSNPDDRRLFIQDRYSSMNYTMNLGRTAGKIITGIVYGLVIVMMAGFCLWFLKIDFTPVRMQVTDNTVAITSGYSNISFDRNEIEDVQLLDALPDDNFYKINGSADGKQYLGKFKGKETGKCQMYVTLDVTPILEIKTPEYTIFINSRESGMAESWYQELKQMIIKINSRSEIPIYLQLRNQIVKGIGKGELEQGEILPTVRQMAADLGVNAMTVSKAYQLLKAEGFIETDRRKGSIVCIPEEEYPTQQAAFEEKLEDELELLTAEAKIRGMDKGQFIQFCQHIFEEMEMVPEMKAAVIDRFGGPEEIYYTDIEKPVPGPDEVLVKNVYIGVGKPDYIMRSGICPFLEAKPPKLVVGNECAGIVEAVGSDVKGIEPGMHVCVNSGLGYGAYAEYIAVPQKFVTVFPDEFPLKYAPGFLNYMVAYALLNEIGRGTDGKSIYIYGAAGGVGTAVIQTALLQGIEVIASASSQEKCDYIKSLGAQCVFNHKEQDAKEVIMDYTRGRGVDLIFDQLVGRRFASQFEYLADFGMIVIYNWLDGSPELDQLDTIIKQSSHASAVRSFSFHIYDDKPERLAKIRKICMDRIISGEIKPHFYMDLPLAEARKAHELMDGLQIMGKLILHVEEMACTTILVGKKASYDGSTMIARNDDSPSGRFTPKKYVVVHPDEQPRKYISVLSHVEIDLPDNPMRYTAVPNALEGDGIWAASGVNEANVAMTATETITSNPRVLGADPLVVYQPAKDGQEEIKGGIGEEDIVCLVLPYIHSAREGVKRLGSLLEQYGTYEMNGIAFQDAEEIWWLETIGGHHWMARKVPDDVYVIMPNQLGIDQFNLEDAFSEQKEYMCSADLKDFIEKYHLNLAMDGVLNPRDAFGSHDDSDHVYNTPRAWYMGRCLNPHTWRWDGPAADFTPYSDNIPWCMVPEKKVTVEDVKYVLSSHFQGTSYDPYAGYGESNMRGAYRSIGINRNDFMSLIQINDNRPDDIKAIQWLAFASNAFNVMVPFYADIETTPDYLSNTTGDVSTDNFYWSSRMIAAMADASYKKSVFHIERYQEHVLSKGHEIINRYDDMIQNEADTDKHLALKHEANQAVADMLKAATSDTLGKVLYELSNEMKNAYSRSDAMAITATELKNNLGKYLILAATEDIFITKNGKTIAKLTSPYQNKLDTVDALFGSIPDTITFEEARKEQLSKVMTETAIRSKMDCIITRNKKDYAKAEIPIYDPIEFWNLLKNDDVNDIYMIKENKRILMITSLIILLPVLVGLLLWHQLPEQIPVHFNSEGVADSYQSKLWGVTFIYLVIFACHWFAAIITSVDPRRRNISSKIYRLVLWICPVISVFVGVTIYGTALNWPWVNINFMANLLLGVIFIVIGNYLPKCRQNYTIGIKLPWTLSDEENWDKTHRFAGKIWMLCGVLEIIVGFLPIAQFEIVTIALILLATIPVAVYSYLLYRKKMGMGFAETFKALSDSVRRDILMLLREGRMSAGEIGSHFDMTGATISYHLNILKKAGLIFETKEKNYIYYTLNTSVVEEVMLWLSELKGGSSDDQGEMNEIINALYQRKSVRVFTDDPITDEDKKLILTSAIQAPSAGCQLLYTILDITDQTKKDRLADLCDHQAFIAAGQMVLIFCADCQKWDAFYKEAGISPRCPGAGDLLLAVEDAMIAAQNAVVAAESLGIGSCYIGDIMENVEEIRTLLALPEYVYPACMLVFGHPTAQQQNRTKPSRFDLSDIVCENAYQTKESSDIRRMFAGRTGLQGYDAWMQAFCNRKYESAFSREMNRSMEIYLKPFLEKEGVSDLEKMKNNKFEIDMCNGSIMDKLISFALPLMVSSILQLMFNAVDIIVIGRFSGSQSLAAVGSTTALIAVFTNLFIGISLGANVLAARFYAAGRHKEMSETVHTAITLALISGILMAVIGQLFARSALELMATPDDVINLSSLYLRIYFLGMPFFMLYNYGAAILRAVGDTKRPLFFLIISGSVNAILNLLLVIVFHLDVAGVAISTVIAQMISCTLVLTCLYRSDSSYQLRFSKLKIQPLYMKQIFQVGVPAGIQSTVINFSNVLLQSSVNSFGSTAMAGYTAANNIFGFMYVSVNAVTQACMSFTSQNYGVGKYKRMDRVLRDCMILSVSVSLIMGILVYVFGPELLHIYTSEEDVIQCGMEILTYTTLTYFFCGLMDLFPGALRGMGHSTVPMILSIVGTVGLRIVWIFLLFPHNRSLDFLFISYPASWIITFIMQIICFYFVRKKVHRELKAHFAVMEFDLGRLLTEESKRMMNCLHEGIFIADKMGNIVFANQALLEMAGGTEEYALSLNVFNFKKQGVDVNKDQLLAQRALETKRRITRISEVKITTGYSYRQLGTATPLLDDEGEIQYIVVEMQTLDHIQRTYQDGLYEQREDFIEEVKKDSSPFICVNPNMKSILNMAKRIADMDTTILITGETGTGKQVLVDYIVSQSHLASKQVVSINCSSIPENLFESELFGYESGSFTGASKNGKMGLFEAAEDGVIFLDEINSMPLSMQGKLLRVLETKRYYRIGSSKERTLKCRFIAATNVDLKGCIATGTFRSDLYYRINIISLNIPPLRERKEDIIPLTQQFLRSFSEKYGVIKMATPELMKILLSYDWPGNVRELRNILEKLVIMTDPKNIYLSEMIESVGFPIKEVPADFVLPIEDLTYYEKLYQAYPEQFSLKNCLENFESSLIKSVLDHTHNTYKAAEILKVDQSSISRKINKYHISYNKKMSNLKNKVIITAALTGALTPKGYKIPETPDEIAEDAYKCWKAGASVVHIHTRAKDGLGAMVTEDFLEIVKKIRAYKDCDVIINCTSSGSTPAHMCPDEMRYRHHELCPEIEMGSVDSGSMNFTPIAVFENSPQFLVKLMTAYNEHDVKPEFEIFDPGMLTNVNYYYNQGLIKTPMHFQFCLGVTGGMPATVENVEYLSRHIPEGSTWSAFGIGAGHMPVLYTAIALGGHVRVGLEDNVVYGFDEDGKKIIATNEMLVKRAVDAVKTFGKQPATAAEAREILGLKPLVRMTALGIIGLILGIIVMIVFAYWGLNAVPLSLLAGAVICIFNGINLWTGFATSWAGGLATVFSAYYILFFVSTCFANIMGETGACTAIAYKFLDWFGKKHIITVLSLFCFLLCYGGVSFFVCMFAVGPIMFKLFEELNIPRKLTIIPIAIGGASWSMAVPGSTQVQNVIPTGLGTTLMAAPLLGFIMAIAGLAISIIYTEHIYKKEMALVAAGKEEGWDKNWKSPVKGELKSRDELPGTVSSFLPLIFLVAFIVIGSLTKFISNATLLSCLGMAFAFIICLVLNRKYLGNSLAAMFKSLFADSAGAAATSALVLGAVVGFGSIVASAPAFQNILTWLIGLDIPIYWKGVISTSVLAGVTASASSGLQLCMQYLGDYFIQSGCDLNVLHRLMAFASVTLDSLPHSTGCFLMFAYLGVNHKLSYKYAFWICTVFTLIVTLVATTVVTIIGLMANYKAVFIGTGMIGAGLGANALLHDFDVTLYDVVSEEQIRKNLKNIFDILVEAGMTTQAIADEKQKTVKISTDLKEALKGGADIVQEAVPEREDLKRSIFRTVQEILGDKTIIVSTTSHYFPSILQKDALYPGNILVAHPYNPSYILPLIEICGPECPKDVIDKVVEVYTAMGKAPIVCRKEVDGFIVNNISWKALFTAMDIVEQGVCSVEDVDRAIMFGPGMRMAILGQIMCISLGIDGGIAKGPEKYGLPHKPIYDIAGKGVEEEIANRDPELGNTVESLNKWRDKALVEILKIQKMLMKSKLTDVVIVGYGRSAVAKSGKKGALRETHPVDLGGLVLRGVLDKIENLPDEAIDDIIVGCAQQEIGQTFNIGRLVAQRAGLPDSVGGMSCNRFCSSGLQTIAIAAAEIQAGIADVIVAGGVESMTAVPISYETMKKAINPWLWKNKRANYLDMGSTAENVAAKCNITREEMDAFAVESHKKAAAAQDAGHLAASIIPLDGIDPEGNPIVFDQDQGIRRGTTMESLASLQPCFKKDGVVTAATSSQTSDGAGFVVLMSAQKAAELNIQPIARFIGFATAGLDPAYMGLGPIYAVPKVMDETGLTVDDMDVIELNEAFAAQSIPCIRELHLDPAKVNPNGGALALGHPLGATGAILSCKLLDELKRTNKKYGLVTMCIGGGMGAAGIYEMCMKIGILGAGAMGSGIAQVFAMNGNYSIYLCDLTEELAEKGKKSIDKTLAYQVKKGKMTDSEKNAILDRITIGTKEIFKDADLIIEAVKENMQIKKETFKELDSIVPANCMFASNTSSLSVTEMSNGLSRPVIGMHFFNPAPVMQLVEVIRGELSTDEQVAKIIEIAKDIGKDPVEVNESAGFAVNRILGPMLNEAIYELYEGVASMEDIDKAMRLGTNMPMGPFQLADYVGLDICLALMETLQHELGSDKYSPCPLLRKMVRAGKLGVKTGIGFYDYRRMEMTNNDWKKKLTSPEEAVKLVHDHDRIFIGFVSNITPVLSDALWERRQELNDITIISGLLLRPTRLYTEPAENQPFKMLSLFLGPFERTAMKIGRPSAFTSLHLSQVDDWFHNIGKVSVVFISASMPDENGNVSFGVSGGSVYRFLLDTADRIILELNPNMPYVYGQDTIFNIKDADAIVMSDKPIPEMAEGEPDEITEKISDQIVPLIPDGATIQLGIGGLSSAIGNKLTDKNDLGIFSEMLCPSMVKLMKNGNVTNKYKGFMDGKSVYAFAAGDKAMYDFMDHNENIYNAYFSFANDPRMIMKNKKMISINTAMAINLYGETAADAIGYHQYSAIGGQLDYVRGAQWSEGGKSIIAMDSSYIKNGKRYSKINFTFPEGTPISTPRSDIEYVATEYGCIDLKHLTMADRVRAMISLAHPDFRDELTEKARHVGLIMIKRIAIMGCGSLGTILGAYLNQAGLDVMMVDAWKEHVDVLNREGATVTGGVQMNVPVKACTPDQMDGIYDLIIYMAKQTFNDIAIPQMLAHCGDDTIICTCQNGLPELAVAKYYPKNKIMGATVGWPATFVGPGTSSLTCSPDAPTFEFHLGRLNGELDEKVYEVQAVLAKMCPGRVNLTKNLMADRWSKVMINATFSGMSTVCADTFYYVIHTERALTCAVRIGRECIRVCHAMGITLPSIFGLDFNKLFDYNDIAGQNAAIATVQKVFDAIQGKASMLQDLEKGRKCEIRFIDGVVADEGKKLGIPTPYTDAVVAIVSEIEDKKRPLQNNLDAMPDLPIAMCTAATYQTKDFYMGRTLDYEFSYGEEITITPRYYPFHFKHGAVLEDHYAMIGMAHVAENYPLYYEGANEKGLAMAGLNFVGNAAYGHPMDDKDNIAVFELIPWLLGQCASVADVRKLVETLNIVDTVFSPQFPNAQLHWLIADANEAITMECMKDGLHIYDNPVGVMTNNPPFDKQLFRLNDYMALSPKQPSNNFSDKLDLGSYSRGMGALGLPGDLSSSSRFVRAAFVKMNALSGNSEVESVNQVFHIMGSVEQQRGCCEVSEGHYEITIYTACMNVSKGIYYYTTYTNHQITAVDMQKENLNGEMLVRYPMLQEEKILIQNMKCAKEDLLLYAVTDRHWLNGRTLYEVVKESLDGGVTFLQLREKTLDEAHFLEEAKELQKLCKEYKVPFIINDNVDIAVAMNADGVHVGQSDMEAGDVRAKLGPNKIIGVSTQTVEQAILAEKHGADYLGVGAVFPTTSKDDAAEVSYDTLKAICEAVSIPVVAIGGITQENVVKLTGSGIDGVAVISAIYAQKDIKKAAADLKAAVKAIVMLGNCIENVRKNVPLVHNITNYVTVNDVANILLACGGSPIMSAEPEDVEDITSICGGLNINIGTLTKSSIEGMFRAGRKANELNHPILLDPVGAGASALRTNTAVQLMEQLKLTVIRGNISEIKTLALGSGTTKGVDADVADAVTKETLDQAVQFVKQFAAKSGSIVAITGAIDLVSDGEKCYVIRNGRPEMGKITGTGCQLSGMMTAFLVANPDNHLEAAAAAVCTMGLAGEIGWGRMQEGDGNSTYRNRIIDAVYNMDASTLDKGAKYEVRMGCIMDHDKKTKHGGHRGSFSGRLGYILAVAGSAVGLGNIWRFPYLAAKYGGGIFLLVYILLTVSFGYVLIMSETSIGRMTKKSPVGAFSFFGKTAPFKIGGWMNAVIPMLIVPYYSTIGGWVIKYLVAYLSGKVQVVAEDGYFSAFISDSWQAELWFIVFAVLVFIIILGGVKNGVELMSRIMMPILVVLAIIVAIYSVTRPGAIEGVKYFLIPNFEHFSWMTVVAAMGQMFYSLSIAMGILYTYGSYISKDIDLEQSTTQIEIFDTGIAILAGLMIIPAVFAFSGGNPETLNAGPSLMFITLPKVFASMGIGTGAGILFFVLVLLAALTSAVSLMETSVSTFMDELHWSRGKASLLMAVVMIVFGSASSLGYGILDFIRIFGMNFLDFFDFMTNSVMMPLAALATCFLVTKVVGFDRIAKEIEQSSKFGRKKLYNFFLKYLAPICLIVILLSSIANVLGIISMMNTYYPIHILVAVPCPPSIRDRFNTQFGSQCHFTFINSSQTIPESLLRHTDVIIGEPDEPDLLKAPRLKWLQLTWAGADKYARMKRLPSHLTITNASGAFGIIISEYVIGTIIALYRSFSVYSHHQAAHTWLPSDNCGTIYKKTVLILGTGDIGSSLAHRLKAFDTSIIGFRRHPNHRALPDFDEVIGSDQLDLKLKTADIVVGCLPNTSETIGLFDEKRLRLMKKEALLINVGRGSLIKNDALLHVLKEGHLKGVALDVSETEPLPKASPLWDLPNVFITPHIAGPSFGGNTDVEQAIWNLCFENIERFLAGQVLNHIVDLRQGYMYQDLSFMKIPLPEDVLKLKNYGDYAGAQKMIRYFLEHKEIPKALRKRLEIEQEIIGVMGADEYPYTYAEALEMMTSHLRDFKEEELQYLKEIGAADWIYIDGEVHFQRLFYDNLTQTRPDLAARVIVQNEELEKENAMKQKLLNGNVHYMKEHGGRTVHTRIRATIKAKKEFEEVGRKVSVHLPIPKVYEQVSNVQIHAANPEITFIAPEDAAQRTVYFETELQPNQEFMVEYSFDYHINYVELDPKRVAGEQPDFCLEEQSPHIMFTPYLRELRDELAGDETNPVILARRFYDFVTTKVMYSFVREYFTIECIPEYCAVNLKGDCGVQALLFITLCRMSGIPARWQSGLYATDYYTGCHDWAQFYVAPYGWVFADLSFGGSAWRAGEIERWNYYFGNLDVFRMPANSEIQKAFVPEKKWLRIDPIDNQRGEFEYEDHGLRFSQVEVSQKLISMEDIEKMLGCMVEESNLGITAAASLGAATRNITRADLDATFYMTERPFKGGIYVEDTKKLVLPDVPGFGFIGFDNEMKYILAKSAAEALEALLAEEGKARIIAGGSDVMVDMEAGKLAPQTLVDITTADDMKGIRIQDDQLIIGAAVTLTEIARSPLIRQYFPSLCKGAGSVGSLQIRNSATLVGNVVTAQPAADAAMAVAPLDPRFVVLSKDGIRELAMGEMYAGFGKSTLNSTAEVVKEIHIPLPADDEKASFVRLELRKSLSLPMLNVAAMAKVTDGVFQWVRITMGPVGVGPTRAFEAEEWLKGKALTPENMAEAGRLALHNAKPRSNPLRGSKKYREHALPILVRRALEGIAKQMGLLHFDNMEKLNMTINGKAISVDVDPGIRLVDFLRDNLFLTGTKIGCGKGECGACTVIMNGKAVTSCIIPVMRAQGAVIETIEGLGKNGKLHPIQEEFINKGAIQCGFCTPGMIMSSKALLDENNAPTSDEVREALGGNICRCTGYVKIEEAVMAAADRMRKGEMKYVGKNIPRNDGFDKATGLGQFTMDVSMPHMLYARVLRSPYAHAKVVKIDTSAAEALPGVVTVCTFENTTNKPFNTSATMVTTPRPAEPVRDQTIFTDEPKYIGDEVAAVAAETEAIAAEAIKRIKVEYEVLPAVYDPVEALKPDSPEVQPLYGNKEHHNVCGEIVRVTFCEHEPYSDEALERGFAQADVIVDANIKLPRVKQCQMEVHAAVASYKANGTLEIISTTQTPTPTKMIVAYAFDLPESKVRVRNPPYLGGGFGVRIGISGKAELLAAALSMKALRPVKIVYSREEDFIASDTRHGGYMHARLGAKKDGTFVALDTTAKLNTGAYCTFGVELLAVCGVCGTAGTYHIPYLRYMGYPVYTNQQTAGAFRGFGTPQGTAVVEACVDKLAKVLDMDPIRLRKMNTMKPDDKNFFPFSVGSVGTNECLDKAAAEIGWYEKRGKVQTGNKRRGVGIACNTHVSNAAPFCVDYNAVNMIIEQDGSLRINTAIPEIGPGSTTALIQVACDLLGVPFETTTMIFGDSAAAPFDIGSHATRTLYSVSQVMEDAAAELKADILSYAAGKDFLDTDASALTLENGIISGNGKEMTLKALAYEAHLKGKQFLVSKCKVPDNSLPFAAQAAEVEVDMELGLVKVLKIAAAHDVGKVINPRLCEGQVEGGVLQGVGWAVREEMTYEEGKGFYNTGFHKYMLPTADDHPEIISILVESNDPKGTFGMKGIGEVGCIPTLPAIFSAVEDATGVRFEEAPLTPDRVLAGLKAAGKIMKPFLGIDITTNRKNERLNGNEFLILKPSEILSQTLAKTTEQKDVIIQKSKMPLLLRIIKSICLFLAFICVSALLRARVSLAEAYHNAPWVFWLLPICVILFVLLTICEKVKSHQVLDTDENQHALATHDRVMKDILAELAVPDNAKNVDVLSCYYTERNGKIKAIEKGLQVHQFSNLIFKAYRDNENLYLTNCNGKYAFPLSSLSSIRTVKKHTVIKEWHKEEPYDKGIYKPYHMSIDKFGCLNCNSYYILEVVHNTETYGIYIPCYELPVFEELTGLRAEMKKISLQWKLTFLTTVLITILCGCLTFFLYKNGVYYFDTLQESITDQSTAPEAVYIDIPDDEWDDFVAQFSMKVYNSKSDYRSRSLLITAIVALFGGAVTYFISGRALKPLREFSETVEKVQAQNLTDYIIEENKIAELDRLRISYNKMLMRLSESFETQRQFTGNAAHELRTPLALIQAQLDLYHTTEHPESTTAAEETIQMVTEQNERLSKLVRTLLDMSELQTVARNDKIEIHSLIEEVLTDLEPLAQEKKVELIQKSQGAGEKADEELFLTGSDILIYRMLYNLVENAIKYNRTDGTVTVSAKREKNEVVLTVSDTGNGIDEAFREQIFEPFFRIDKSRSRELGGVGLGLAMVREVVRVHDGTIKVYTNEHGGTTFEVCGLAEYRDNEMLLLFKRLIDRSMVTLYNIECKFPVKKMEKSKLRLLVVEDEKKLCDMIAKSLHLAGYEVDTCNDGEQALDMIYAEMYDLIVLDLNLPGLDGMEILRELRKENEETKVLILSARSQIADKVEGLDSGANDYMEKPFHLQELEARVRSLTRRKFVQKNICLECGKLRFDTRERVAYAEDNPVTLTRKENGILEYLLLNQGRPVSQEELIEHVWDSSVDSFSGSIRVHMSSLRKKLKAGLGYDPIVNKIGEGYKIGGDSRAMKSEKATQVFLLAAGMVFFLVGIFRGEAAVVLSKAIKLCMECVGIGMKSNKNFLARFRGWIQAVATLLTNIHIPNLFKGKIYQGNVKTMCVPGLNCYSCPAATGACPIGAFQAVVGSSKFKFTYYITGFFILLGVLLGRFICGFLCPFGWFQDLLHKIPGKKLSTAKLKPLRYLKYVILVVFVILLPAFVTNSLGMGDPFFCKYICPQGVLEGAIPLALANSGIRAALGHLFTFKFTILALFIILSILFYRPFCKWICPLGAIYSLFNKVSFLKIQVDHEKCVGCQKCSRVCKMDVNVVDTPNHPECIRCGECMKACPTDAICYHYGFSTKKQAENKNMKNKTLRTNSMKLKKVIAASLAISVLFAFTGCGNSSTTDNTNTKQESSSTTDNTNTKQESSSTTETGSADELNEKRDDLYQQENQLFADHKDAWDKAFGLMNKNAAGDAMSENYADSLASTVESNKDSFSEEEYKTLCKDIETIRGIEEEIAKLEKEIAASDSSDSSSSKSDESTAVFKGFKGKDLDGNDVDDSLFAKNKVTVVNFWFSGCKPCVGELSKLNELNEKLKEMGGEVVGINTDTLDDNQDGIKEAKEILKAQGASYKNLTFDSDSTVGKYAGNIMAFPTTVLVDKDGNIIGEPFMGGIDDQSNYDQLMKQIQSVLDQKMHCRKGQCIFPLDVTTIGKSGMYFAINKERSDIKTELDYAMHQLDQDSPFFKADLYKKYFTLDYNQSLTGGEKSWLEEHGDIRIGFLNNDPTIFSRDEETEKLTGMLAEYTSYAKDCLGNQTLKFNIQEYDDYSEMLQALQEHEIDMIFYAGRNSDLAEKKGYTLTNTAWTYSLMAVTDEKYFNEDESYTVAMPKEQEALKQHIAFSYPQWKLVDYDSLTDAADMVTNEKADCFLMGASQALIYDNNRDFKSVPLTKTMEIMDDFKKLTEQLLKVYINAESVDNFGIENYFDENISLIGTGKHELFTNLHEFLESFKFDVKRRGKIRLEVQNLHQKEERLDDDHVLAHGTVDFVGLFKDGSICFKMETRFTIIYKWTNGKWLVQHLHQSTPDLEQMDGEEFPLTLGKQMKKTQQALQALGTAYYHISRLNLKTKKIELVKISREMDKGIKDNTADWDPQFKIIEDTIAEPFVQKYIDFFDIQTMAARLHNKESMSSEFKEKNGSWFHSMVVPQSYDKNGNVTSVLFANRDVTDEKMRELRQEEELREAKSKAECANKAKSSFLYNMSHDIRTPMNAIIGYAELASRHLQETDKLGRYLEEIQICGKELLSMLGNVLDLARIENNKVEMEYTVSNVHECFENCVIMFQQQAESKNQTLSLTEQIMYPYVYMDVPHMSEICLNIISNAIKYTNTGGRISCNVVQKSCEKEDWCNMIITITDNGIGMSEEFQKRIFETFERERNTTSSHIEGSGIGMGITKKLVELMDGTIEVKSKQGKGSTFTVTIPCRKASEADSLVKKNSNLCEKKCLNGVRILLVEDNEINTEIATELLTEEGCIVETANDGVACVDMIEKADADYYKMILMDIQMPIMNGYDATLTIRKMKDKKKASIPIIAMTANAFAEDTQKVLSVGMNDHVAKPVDMNILVPTMMKYLMYVQVTQEIKSEKTEKREYERLLEIRDNYPKYVLRTDEFAGGNYQGIKSMHIADFLLSTEYMVRCTDVRTAMELTKSGSVKNFKTDFCKMKAKDCRSMLERHKLGMFLRKHLEEGVYQVSAVSASDVLKRNTDSLRCAVENDVFASFTQDSLLDELEIYSGGNDCRFGIMEKLNLTQEWDKVFPKSDKVDHKKVTFHNRYGITLAADMYTPKGTEGKLPAIAVSGPFGAVKEQSSGLYAQKMAELGFLTIAFDPSYTGESGGTPRYVASPDINTEDFCAAVDFLSVQENVDFERIGIIGICGWGGMAINAAAIDTRIKATAAMTMYDMTRVTANGYFDAENSEQARYEKKKAMNAQRTVDYKNGTYALAGGVVDPLPEDVPQFVKDYYAYYKTPRGHHPRSLNSNNGWNVTSSLSFLNMPILQYSSEIHSAVLLVHGEKAHSRYFSETAYSKLTGDNKELLIIPGANHTDLYDQMDIIPFEKLNAFFTEYLRMYAVKASNYKGLRRGSPVYCRNNWHIHHAKNGGGQILVCVAGRGYYQEWGKPAQELRPGDVVNIPVGVKHWHGAAPDSWFSHLAVEVPGDETSNEWLEAVDNTVYFKAAGKEVMAKITQTAGRNALGTFAPEFAHFNDDVLFGENWNNEDIDLKTRSIITVVALMAQGITDSSLKFHLQNAKDHGVTQKEIAAIITHIAFYAGWPKGWAVFNLAKEVWNEEEIEKMDIEQMKKDLGGGNVFPIGEDNVAFAKYFTGECYLNMLTTERVPVGLVTFAPRTINAYHIHHKGGQILMVTGGRGWYQEEGKPARELKAGDVVNIPPEVKHWHGAAKDSWFQHLAVEVPAEGASNEWLEFLPEEEYDKLPMNKYDKMLELNKRKSEEKVERAILAIRTMVLEKEKVSVPALMQKTGLSRGFFYKNPIVRSEIDAAMEQQAGMVDPRRNIISQAMETEMYLLQQQIQKLKSENENLKKENQKLKKALSKRELNLIKQLMNERLEYQQLECYKLANDMQKEKLNREPYFDLGKLPGKQLQTEFAEYIYYRGTQVSILTIKAERQHFNSLCEFFKKPSHQENSLLDRGKDIWIKQLKLWMMQIGRALTKYKVTSIQTESVEKAALIRYFENLLEFTLDRSETNELAKDIWHLERLPLILRTNPIVNHKTLNFRGIRQPDIREEVKKAIYHHLETEAVGSIKRELSAMNKFSKYLEEKHPKISTSEELDREIIEQFLINIKVEASGGKGIRDDLLKIRNVLETIGKIYNFPHLTKLFLKSDFPPERKAEFKSYSDSELKRLNAHLVKMEVQIARAMIIHQMLGTRISDTLTLRKDCLYKNGSQDMIVIYQPKTRRYEKPISQELAQLIGKAVSYANEHYPESIYIFAAENKPEKPISYRTLQDKVLRMIYEKDIRDDNGNLFGFGTHMFRHCYGVKLTELHVDDWTIAKLLGHKGVRSVQYYRKMSNQRLADETREVRNLMSQIILANLDGWGEEYEQIRQDVGIEMPAFLQFFIEAEEERSRRIEQLRKEVREYAEEEAGSSITEQILLFLADEMVERLSEIDYELRKKFESYITPLIKQKYLYRYTGTFDRIRQSYIRVRMKTPAGQRECEWKYKNEILFVPYHSEQTIVKSVETVRCRSNMVWNFKAEASEKMKRQIFTVLEYILEHYEVSRLREYKLTGLQFFYEFCIREQITDIHLMELKQETLFQSYLEQKVEKEQRRKRLRTIVETARKVIFVQADEIRWDAAVWYLDRFHIAKERRNQSDSIERISFQEVLYPKNRWLLQEYMKYEIGIGELALSTVYERFRTIRNFLQEIDEHQIDVTECDAGLIDTYLKNLQNGSMGAKTFNTNVTAIQFFMKFLEVKGYIKKVPFYVSYYWEKEIPVHHNRSVEEDVYMEIIQNLSQFPEHLRMMFLHLWCVGLRVSEVCTLKGDAYDIQNGDCWIKVYQVKMKNYKRVPIPITLYRLMQVYLKKHQRGKEAYIFQNRKGGAFSKSTFMDQMKKYCIQIGIQKGEYIFKSHDYRHTVATNFYEHGVSIQSIRDYLGHIFEEMTMQYIDYMPRKIAKQNDTYFEEEGNSLLACMQKGEQNEMRRYELETEREGSAVYFFIRDIETLDIVLLPTKYLMHKIRSKCSPNTIRRSALSILYYLEYIHEKEQELIDIYQMPYVEQTEHFVKFLYWLKAGKHTQDENHRSPNNGTCNAYLKDVFRFYLFIEEEYQQFGELKALSYNYFMAVDAVGVKKSIRSRSFKGYLKEEEHKARAAKKDEIVEILKACTNIRDRLLMLLLAETGYRIGEILGIDYSKDIDYRNHIIRVYFREDNENGARAKNAEYRSAKISKDTFDFLNLYIAEYRKLLQHQTSLFVNISGDNIGKPMNVEAVYSMLKRMEKKTGIKITPHMLRHYFGNERRKAGWSLELIQLAYGHRHIQTTINYLDIVDDELLDASQEFYEKHSSLYGIEELLMCYKNEYQKRAHGEVEQIFRELLPEAGLHVREEQIRLCHEMLDALMKNEITLCDAGVGIGKTYAYLTACILMRKYSVLHSGYSGCDRRSVVVSTSSIALQKAIIEEYVPFLSDVLLKADLLQGELKAVVRKGKEHFVCDYRLAQRLEAVRDKNKNQAQMEALKSLRHNFDLDSVHNLSGFDRRLVCVPKFCPRECPGKVECRYQKHLDSSRKEDIFLQICNHNYLLADAMHRANGYRPLLADYRALVVDEAHKLPEAASQMYGRSIGREDVQEIAYFLGREHKGTDGKRLMEGFSALQAEIRKHRKDGTEDMAGKESFYFPPGAGTALAQMQERLQLMIKRLAGNIPYWIFRRMEEMEELFGWFLKNDKRYILFLQQDSRGHLTFMAVNREIPKYLDATLWSRGFPAILTSGTLKAGNGFARTRQMTGLEKETGVRECVAESPFCYKENCLLYIPEHLRPMKKGSREEAEQLAGQIRDLVCSTYGHTLVLFTSYTLMGNVHQLLRDQIPFPMVQVWRNSQEEIARFKKMENAVLFAAGSCWEGVDFPGDMVSSLIIVKLPFSVPDPIHEAQKEQYRSLESYIQTIVVPDMQKKLRQGFGRAIRTEQDTCVVSILDHRTAKKGRYRSDVLEALPKCQMAERIEEVENFIRSRKVERYYSMEETKRSGMSKDQFWNLIEKAKEVCGTDLDASAVWIKQQLFYMTPEDVLQFHNLVYSYRDAAYKYGLWTAAGIMMEAGCSDDSFSDFRMWLIAQGKEVYLNALKDPDSLSGVTPYGYCSFEALGYISSQVYSAMKGKNIYQDSTARMQMECYEQVIRDIVYHPMIEYPLELPEAMVVYPKLCECHLSEQVRKAPQKVRTWNVSRTDIRRMMARGNAAIKKMQEQGQNTPEATRPVRKGTVRMDEKEVSEMQEEMMTVLVVEPMKAPYVKSIPNELEDLQQAVGGDIEMTYPFEDEVGILLNGNGKFEGLPLNRALYDDRGQVYDAIAGTFLVVGLTEDDFTSLTPEQIEKFKEKYQSPEVFTLFNGELHVMKMPPQEQKEQKESRKKDAQQKNPAKGKKKNRSGEARMAYNKAKEEYRWNQWKAEEEKILREQGVDEETIQKLREYDWNDFNAERRFREHQTSLLDCMELLLEEKESGESQPESVEALLDTVENEELLQILLSTDKKTLQMVVLKMMGYAPKEISHHMELPEQTVYTRLRRLREKIKKSMKFEMQGNSRDAGHSCGQEERARSPPHSDLISQKFRSEEKISGLMKDTKYKILAYFDNQSYRKLFNEVNSDYAENLQILLHNLSLFSYDVLIIGVILYKENISNIISAIRKITQIPIIILTDASSLLCMSWKKELIYAGADCVMDINSTIEEVDLQIFSLARRNNKQKITQKQSETMINKGKLVMDHKKHKVFWNNVALHLTRQEYNFLYLLAVTPMRVYTFEQIYQLVWKDYSVGDIKNIIWCLVKRLRKKLNVVEDGAGNCIVSVRDIGYKFELNNENEQQMKIHASGEDYLEAVLVLQKKLGMVRSVDVARYMEVSKPSVCYAVGTLREGGFLTMDEKHYLHLTELGRDMAEKIYERHCFFTHQLISVGVNPQIAEVDACRMEHAVSDESFQKLKEHAMREIASQKIDNTFDDFPVKKMIEFKDVAFQYEQGSSKGKIENINLTIHDGEVVLICGESGCGKTTLTRLINGLIPHYYEGTLTGQTIVEGIDVKNVSLYALSGVVGSVFQNPRTQFFTVDTTSEIAFGCENLAIDADEINLRIEKTVGALKIEDLLNRSLFALSGGEKQKIACASVSAMEPDIFVLDEPSSNLDIKSIRELKDVLRKWKAQGKTIVIAEHRLYYLMDIADRVLYMQGGQIKENLSISDFKKKSTGELHALGLRTLQSEDFSKMQSTVCATKQLYIRDFEVSYKNASGGKKKKRKVLDISDLMIPQGSVVGVVGNNGAGKTTFANNLCGLLKTAKGGMSMDGKTYMANQRIKTCYMVMQDVNHQLFTESVMDEILLSLDNSDEEKAAHEAESIMESLHISEFRDAHPMSLSGGQKQRVAIASAIASDKQVIVFDEPTSGLDYRHMKKVAENLRELSSLGKTLFIVTHDPELIAECCNYFVFIENGKVLWSDGWNRISRERLQKFFAFEDDMKPELLLSVDSERRFWLDPRTKLYMLVIFSIVMIDGKTDGISFWLKPILALVPFFLLLSGSRKKVAIIYLIVFVVSWAVNIFLVPYMGLIGTIIISLLAQFGTRWFPSAMMGYYLLSTTKVSEFVLAMQRMHIPEAFIIPFSVMFRFFPTISEEAGSIGNAMRMRGITGKNFFKNPQAVLEYRIVPLMMSVVTIGNDLSAAALTRGLGNGKKRTSICKIGFHWKDFALMIIVTAALLVFLLFMDKKKLNAKDFINIGIFTVIYFVMFFITGMMGYIPIFAVIIPLVLGILGGIPFMLFLTKTGKFGAATIMGTLVSVLCFLMGQSWISIPFGIVFGFLADLIFKAGEYKSWKHTVLGYCVFTEWVIGSMLPMWIMRDTFFEAYRSRGGTDEYINAIMGLTANWMLPVVIVLGIVGGVIGAYLGKAILKKHFVKAGIVMIHSFRKFFEFAGRQSRNWYLGLFYEIIRCILEALQFAALLVVLDGLVHDNITAQTALLAFGIMLVSVIGTAIFWYLAHGKEGEGSYRMCEDKRIQIGNRMKYMPMGYFNSHSLGNLTSVSTATMSDLESMSFAVIVRTLVGVIHASIFSVAMSYFSWKISLIFLTGVILFMVINTMLLRCSKRLSPIRLDAQTEFMDAVLEYIQGMSVVRAFHMAKQSNTTLEKSIDETQRKNQLIERQRIPYIAAEQVVLRIASATAAFCSIALFINGALELTYCLIILVSAFMVYSQLESAGEMFFMLSMIDASIDRVEEINQSPQIDIDGKEQIPDRLDIEMQNISFSYGDKKVIDHVSLTIPQGTTTAIVGPSGSGKTTLVNLIARFWDVDSGSVRIGGIDVKDYKLDSLMKNISMVFQNVYLFPDTIENNIKFGSPNATHEEIVKAAKAARCHDFISALPKGYQTVIGESGATISGGEKQRISIARAIMKDAPIIILDEATANVDPENEAELQKAIEALTQGKTIIMIAHRLKTVKNADQIIVIDRGKISQQGTHDELIKQAGIYADFVGMREKAIGWKIKADSLAMNQSQGGNPFGRLVEFARPHKTGYIISVVLAVLGVAFGIVPYFATARMTIELLSGNRDLSFYMMWCLISGGGFVLKAILMGISTRASHEATFAVLSEARRKIASKLTRVPMGYILNTPSGQLKNGMVERIEQLEVPLAHVIPEMTSNLLVPIAIIIYLFILDWRMALVSLITIPVGMMCYMGMMKEYPKKYGEVVKAGNHMSATTVEYIGGIEVIKAFNQADNSYQKFTDAVHANADLILDWMKDTQKYSAIMMSVWPAALISVLPVGCLFYMNGSLSSATFITVIVLSLGIAGPLVAAMFFTDDIAKIGTVMGEIDGILNQPELVRSEGKYDLPNLDISLENVYFAYDEKEVLKGINLTIPQGKITAFVGPSGSGKSTIAKLIASFWDVTGGLITIGGKSVKEISTDQLNDLISYVSQDNYLFNDTVRNNIRMGKPEASDSEVEQIAKASGCHEFIMNLEHGYETVVGGAGGHLSGGERQRIAIARAMLKNAPIVILDEATSYTDPENEAVIQEAISRLTKGKTLIVIAHRLSTITDADQIVVVKDGTIQAKGTHEELLKECSLYHTMWTAHMGAKEVKTVMASRVEGFDKKILACAKEEFLEKGYTDASIRTIAQNAGVSTSTIYTRYSDKEGLFRFLVEPAANGLKELLRQSLNGFSSLTEHEQNEKIMEYSDRGFEGVIAYIYEYFSEFKLLITRAPENYYQDFLEGLVELDTGCTKKFLIQAGSKALAEGRITDGFLHVVSSAFYSGIFEVVIHDMPMEEAKKYINELRSFYGNGWKEYYRKMEKGSRKQQKPKAGDELGNDIQWAGLVSSRSLTAEEMLEYKRQHWTVENRLHYVLDETFGEDKSTIKKGKNTMSTLRKCSYNIVRLLQMKDQKGREYVPDIIDDICDDLEIDLRMIFSPIPSFYMLQVKKNCPALYEEVMELFNGLSEEQENGKKGFLDKYGDHYSEIETSEKNRERYEYRKCQSYSDPDGIKGLQEEPPHVASVGRMFQVRIMQVQDEFGNDITPMKDIKTKEVTTKPKTKNPASRIPKELMRTAILESKEKSQTIANARDNDMGEQSPSEYASGKVTSAEEWAARKTGRTVTRAGKTAAQTSYEKIKQRAVGKKEVEKEAEKETARGTGDTQTADPASRETPEQKSREVQIQKAQRQKAVSDAVKTKEQKIRAARETPRIQNGQEIAEMKQLSIREQSRKKEAKDTVRQTAIRQKQPETIRIKEKPRKQPEPKTIQKRTIKTAPQSAKISVQPEQKLRATSSNALTVRMQKQMERRAAKQAAKKAAMQTSNSVRRMQKTARAGQNTFKAAKAAVEAAAKTVQSMMAALGAAGAVIVLLLVIMVGIVGGAAFSGSSESSEALSQEVLSYTATIQKYANQYGIPEYVSVIQAIMMQESGGRGTDPMQSSECPYNTRYANSPNAIQDTDYSIQVGIQYYADCLKEAGCTSPQDMDKLKLSLQGYNYGNGYITWAIRKYGGYSAENALQFSNEQAASHGWSAYGDPEYVPHVLRYYSSGGLFADLFGGNGQIVSVALTQLGNEGGQKFWSWYGFDSHVAWCACFASWCGDQAGLIESGKMPKFSLCDDGIAWFQSKEKWKSRGYSPAPGTLIFFDWNGDGTSDHVGIVEKTEGSTVYTVEGNSSNAVNQRSYNINNGTIMGYGILMPLIKTLSQTLKQDKEKFKVPKSVQQAIPIRKIWPDGIFQVESKYSRTFRFTDINYSIASKADKTEMFLDYSELLNALDSGCTAKITLNNRKINKEEFEQSLLIPMKGDGLDEYRKEYNDMLLSKISGTNNSIYQERYLTISVHKKNIDEARTYFARVGTDIITHLAKLSSIGEELDAEQRLQIFRDFFKADVPQSFPFDMKAFAKKGHSFKDWICPDTMEFHNDHFKLGEQYGRVLFMEDYASYVKDEMISELCSLGRNLMLSIDIIPVPTDEAVREIQNRLLGVETNVTNWQRRQNANNNFSAVVPYDMELQRKETKEMLDDLTTRDQRMMFGILTMVHMADSKKQLDSDTETLYSIARKHLCQMTTLKWQQVDGLNTVLPYGLRKIDAVRTLTTESTAVLIPFHTQEIMQPGGIYYGQNAVSKNMLVADRRKLLNGNSFRLGVSGSGKSFSAKEEIVDLALSTEDDILILDPESEFASLVEALNGEVIRISATSDTHLNALDMDSAYGNDRNPLIEKSEFILSLFEQLVGAGNLSAKEKSILDRCTADVYRDYMRGGYKGQVPTLKDLYRQLMLQPEEEARGLALSSELFINGSLNTFAQETNVNTKSRIIDYDIRELGEQLMPLGMLVTLDSIFNRVIQNWKKGKTTWIFADEFYLLFRYEYSADFFYRLYKRIRKYSGFVTGLTQNVEELLKSDTARLMLANSEFLILLNQATTDRDELAALLNISDNQLSYITNVGAGHGLIRCSGNLVPFENSFPRNTKLYRLMTTKPGEAMEVKMNKEIRDYQESMFWGLSFRQCLFSVLAILAALGIYFVTRKYAGEQVTGWLCILGAAPFAACGFFRYHGMTAEQFAWVVIKSELLYPKRLVFKSENLYFSCMEESLRLGEKMMGNGAELLEKKRTKQKKPKKRRGRGDAFDMEEPKTLSYDWQYGREELFLRVDSYMSNDNLYIGLYHMEDGYPESFADLTVNLPFAPLGGINEAYIDHNFSKEKLRFIKQHKLGTIQPDTASSGYCIFQRVTFDLKKLAELDPEGTKRFMERNGIRQRDVPKQKQKKKQRLQRERMTNINGGLKAIGYGLLVLFFAAGLVKTCGSFTDMKKPEHVVKAFIRFALAQGAVMSGMELLTAIFSIVQGIVTNIMSHSGMAGGTVTELPSEIVDKIEAVGMLESIPLWIVTLLGSLLITVLSFVMILTVYGRMFKLYMYTAIAPIPLATFAGEPTQSVGKNFIRSYAGVCLEGAIIALACIIFSVFASSPPAIGDTSLSAVTIVWNYVGELVFNLLVLVGAVKASDRIVKEIMGLMAFSPPLMFVITLQIAPPLKFSGLCVSSVQISASLSLQVCKAEFRFCTIQLSLKQFHLPSSKVSREPAFRMAPLLDSSPIPMNLLKNKKHTEIRKETAPLKMKRGQKKLFALYAVMVLSICIGATCVYAAGDPLTVVNNLSTFIFSLIRAIGLILLGFGIVQVGLSLKSHDPSQRANGFLTLAGGIIITFAKEILDLIMGMIWLAGLPVIWWVAILLADAIQPGRNLFKLMEVLTEKLNHPFQFHYTEYTIKSVLVCTLLYAAGIGIFYSSQKNYRRGEEHGSARWGDARQICKKYSQKPYSQNILLTQNFRISLDTHKHRRCLNILVVGGSGAGKSRGFALPNIMQCCCSMVITDPKAELLRKTGGLLEKKGYEVRVFDLINPDTSFCYNPFEYVHDDKDVLRLISNLIQNTTPKGSQSSDPFWEKSETALLQALMLYLLHEAPPEEQNFAMIMEMLGSAQVKEEDEDYESPLDILFDRLEMRDPDSIAVKQYHIYKQAAGKTAKSILISVGVRLAAFNLPQIAKLTNTDELDLSSMGERKVALFCCIPDADTSLNYLVGMIYSQLFQTLYYMADRVHGGALPVPVNCIMDEFPNVSLPNEFEKILATCRSRSIYCSIIIQNMSQLKALFKDSWESLVGNCDEFLYLGGNEKETHKYVSELLGKETIDTNTYGQTKGKSGSYSTNFQQSGRELLQPDEVRMLDNQNALLFIRGERPILDAKYDLMKHPNIRYTEDGGAGPFNYAKAPLAHDDFTFDETRYDDYELLLDEDIIGELFMPPGLKGKVDMVDDAGQIHVNWENGSSLALVPGVDSFHITDLPRAERPKQQPSRMTRMRYVKMDRIMNHMLIHALREVFRQEKEQGLPVDTTRDLVLKLAEQEEGKLYLTEAEHSKSVEALNQLRDTYLKNGRYSDGIDSVLLKIMKSRYRPYRGRGRMDLTKFLGQDSQEQSAQRLSKEEYAAQKKQEREEIWGMIDGKAQEVFQNGDSLKGFLDFMGQCKPQRTDNLFLLYAQNPEIRQVKTFEKWKEEGKVVKTGSKGYNFIVGQEYEKDGVIQQGYSIQKAYDISQIRTKQPEEAEPKPMDQLMEALLTDSEVRIQIADHLPDKVQAQYIPNKRTIYVRNGMSENATFHSISRELACASLDHHDGSYSRAGVSAQAYCAAYVTAQKYGVDVSGFSFDKVCQMQAFGQKDPKELRSFIQDVKSAAYSIGKQVDRNLGKSEQEFMTDEFAIPEEKTEKPDKSKKSPERMNYGGDAADQIVRYSLDGVDHGLRLSGTLAKHLAVFVAAVLKDQKKTRGKTRMVRMLKENKPLKFFTVPSDRLREFCSEGRKRGLLYVIIRDKKNPEMSEVMVFADDAAKVNRVMDKMNLDFVRSEVGEAVHEVTAGMEAPETEAVQETVQMPEGEVQFEISDLDEAFQVGDMDFSEGEKNQNHPEKEFSEPENFIPVQEEEEENLSGSSLHSRNISTGQEKGTDAGQREQERPSVRRELENIKREKAEESQKRSREKNRGLRKTQKKARKKRKVKARMAYTSIIPVSRLDNSITYIRNKDKTTKKGQSAGSLEEAIDYAMNRDKTERSVFEDAIGCVCETAYQDMVATKKRYHKMDGVQGYHLVQSFVKGEVTPELAHQIGMEMAERLLQGKYEAVITTHLNTEHYHNHIVFNSVSMEDGKKYHSNSRSYYEDVRKASDALCLKYGLSVIEPKNGKGKSYAQWMAEQDGKPTWRTSIRLDIRDAVAESFTWKQFLEQMKQRGYQWKLNRKYIALKAPGMERYIRLRSLGKHYSEESIRQWILQPKSRIPAGKEGDSRSPKKKLKGIQALYYSYLYQMGALKQKPKRISPVLRADIRKLDARIEQMEFLQKHQITTREELLAYRTSLEERVQALTKERKRLYRSEPDSVRIGQITEELKPLRKDIRICIRIEQQSQEMEEKMRLAEQIQRQEEEQTEKNRKPRTESRMRKRNHVIPVRLNTKELRFLEEQVEKSGLSREEYIRSIVMGGEVRARPCEHHTELLRKISGLCNNTNQLAHVANGCGMAGEESIREILRMTKETWRLVKEEWMLGFILGTMTGGAMGVFAMCLLISGKREDKALERCRMKPKEIIDHGVCICFVNSQGQELFRLSDGESLVQNAPNGERNVSTCHYLDAESAMIDGKKWNLLEFAKEMEKRGIMLAPMELCRVPERGMVVLEQALAYVCCSAEEGKTKVQRYCRKIYELGYVPICPQYSFSPFLDDGDAEDMQAMRRMSHQILRRCRMVVVCGKETTGTMNTEISMADRLHIICTTLDGLSKIKENEMPMGNTLKLEDLLKPDCLPDESAGGENWRILHGDTLKLVKGFQPGIFDAVVTDPPYASGGTKQNERNRTTNQKYSSMKAENALPDFDGDNKDQRSWTHWMAEWLYDVRKACKRGAPICLFIDWRQYPSITDALQWAGWIWRGTAVWDKGNSRPQKGRFRQQAEYIVWGSNGPMPINRPVSCLPGVFRYGNPQNRIHVTEKPLQLMKDVIQICEPGGLILDPFAGAGTTILAAAESGYQAVGIEVTDAYYKLGSDRVRIALEALEEAENEESQMPIKEKIEVEMLSPLMAEFIPDYSDIVDLDDAEPLEGPDLVQYQPSIAEKVDEINRLGMPDNQPCNLIDYFDRNKDIKEKVERITMAVKEQEGVLYGCANLTLRENLTPEEYRVVGQYLRGQYSDGWGESLEQREIKVDGGELYLHFYVGAGSDFQIQVKAPENEMQEKQSKPKPSHPKLKLLGHDGNIFSILGDASRLLRCAGMSEQANEMADRVHKSGNYYEALGIISEYVETELSDHREQRRTPRKEVPKKEDTCRMPWIPEEEIKRAREITAIEYLKKYQPNRLKKSSARNEWELTDHDSFKINELTSQWHWKSRDIGGTSALNFLIHVDGCSFLEAVQMLKGEYPTYIPPPVETKPQKPFVLPPASPDCRRVFRYLKERGISSEVLQQCVHLGILYESLPYHNAVFVGKDENQVARYAFLRGIYDASGKSFKMEQAGSEKAYAFCVPAQTGCRRVAVYEACVDVIAHMTLEQGSRDKYRLELGGISAPKEGQSQRSMKKPQALEHFLSQHPEITEIEVCTDNDFAGRWACEHIRKAYEGSYRIIENLPEIKGADWADMAKMVARTPEKRQRKEVRMKRFYTAESVTEGHPDKLCDLIADSILDACLKEDENSRVACEVLATKGNIIVAGEITSRFEPQVFEIIKKVLESAGYEAEEIHMDALIHKQSPDIAGAVERSRERRAGTVSVQSGLASGAGDQGIMIGYACDETPQLMPMPVVLVNRIVRELSASRRSGYIMGILPDGKAQVTVEYEDDRPVRLDTVIVSCQHEKEKSLRKLEHEIREKVLRPALRMLPPDEDTKILINPSGRFVCGGLDADTGLTGRKLMVDTYGSLVPHGGGAFSGKDCSKVDRSGAYMARYIAKNMVAAGLASRCQVSLAYAIGVAQPVMVQVDTFGTGKICADDCLAAAIPLVFGLTPSQISDTLHLKRPIYRQSAVFGHFGRKEFPWEKTDKAEQLRDTVMMKIVKKLFQAVCLAALFLSAGFLIYHMVYLPMENKKLVAELKGNFPEPEAPGASGSEKKDQPAGRKCPVAAVDLVTLRKQYLDVQGWLTIPDTGIDYPVLQSEQENGEFYLKRNYKKEYDINGSLFLQADCKVSESRNLIIYGHNMNSGAMFGNLDFYADETYYQEHPFAYLQTEDSIQEYRIVTVLKADRNLFPFQQKLADAEAVQEYLKVAKQREVFETGDDYLKCIYDKVLTLVTCSYEWSGARNIVLAVPVSGAVWSQKCSMDLDQMAYRCPKAEVVETVRLEGYRLTFAGAGSGLATIFPEEGSHVDGVLWSLTGDCEKSLDLYEGYPDFYDKQEITVKNKGGREIKAIVYIMTKDYMQNFNPPGRSYLTGILKGCRQNQIPTEPILKAARKPPVPGQTQKSQPKKRKAGQERMKSKYRFRRILSGVMAAVTILSTVISPLTVYASEEPKAAEPPAYESVKDQLDENEVVKATDLELEVGQDFDVSTDFTNLEIKDESKVKVTFQKAENDAGENFSTSHADTYHAVYYVEPVNQNQPVYQIGRNLIVKEPVTAAQSEPQTEQAVTEEDTGSDDEEAASQEETETVPVETEIVEPETVESETEEPEETEPEFQDGLSESEFDAALEESETENTTDEESGLTLSDVLEQAGEQDIDLMAMEDGETVSFTAVNTSTRATQDVGVTRGAAYYYADYGLGSYVTYKYTVKFGNVSATAYCVQPSKAGPGDGVYKITKLGDSKALAKVCYYGTKASGENGFFSEKHPDFSAGKQFIIVHLAASYANNSSDAFSGTNATGQALAMELYNYCMSQPEIPEVDMSFSNANVTAYISGNSQRTEEITFKASELQTITMKLPSGVKLHNVTTGKTSSAGASVEICGGTKFYLSAPLTQAVNVKGEWSVTMKGSIIKDYSAYKITTGSETQDLALVFGEGVTDEKYVDFKVSWVKQATLEIVKKDRKSNKAIAGAVYGVYSDKDGKNLITKMPATDANGASSVTITKTQDTVYLKEISVPNGYLLDTKAYDVKLVIGDTVKQTVTDAEQMASLTVYKLGEVLTGAKVTDDGVSFVYTEQKQKGAVYNVYAAEEIVSADGTIIYKKDALVKAGLTTGDDGSATLDKLYLGKYVVKEMQAPQNLVCTGESQEITLSYAGSNVEKVMGSVTFKNDRQKASVSVYKQDKETRKYLPGGTYGLYAGNDIKAADGTIVVKKDTLIEKAVTGTDGKAVYQADLPIVNSYYMKELGAPAGYVRNGEDVYSFTFQYTTDKEATVSFNHTFQNERINAKIKLVKEDSETGKTAQGDATLEGAVYGLYAREDIVHPDGQTGVLYPAGTQIATLTTDTEGNAEVADLYLGKYYVKELTPPVGYLADTEEHDLECNDEGDLVQTVERTATSLEDVIKQPFQVIKAANNGKTDADLLKGVGFSAYLESSLKKNKDGSYDFASATPVVLTADGQTEMFTDERGYACSIPLAYGTYIVRETTTPHNFKPVDDFKVVISENNPDQPQVWRVLLDEEFEAKLKIVKKDNETKKSVLVPNTEFKVYNLDNKKYVEQVTTYPSTTVHKSYFTDENGYLILPQNLACGNYRIEEVTAPDGYTHSANTVEIKVDSDTAYQEDPVSGDLIIEVEFENHPAKGRLTIHKEGEVVKGFDKDFTYEEASLAGAVFEVYAAEDIYTADHQKDENGNRYLEYAKDTLVATVTTDETGSAVIENLPLGTYRVEEKKAPEGYTWNAKGEEVTFTYAGQDTPVVDEEVTFKNERQKVSITVEKQDAETGSVVAGAVFGLYNKKEIKSGNKVIVKADTLLQEITSDEKGQAHFTLDLPLGTYYVKEISAPDGFVSSDEVLEFDATYQGQDIPTIKLKSVKKNQPTTIEMTKSDLTTGVELNGASLSVLDKDGNVIDSWTSVKDEPHVIKYLTVGKTYILRESLAPLGYLKTTDVEFTVQDTAEVQKVEMKDDVPKALLIVNKKGEFLDKITLLDNVKGVVEHLFEYITGSLSDVTFEIYAAEDIKAADGVSPDYYSKDELVATVTTDANGIAEVSDLPVGKYYVKEVGTAYGYVLDDEPRYVDLSYRDQDTPVVVYDEDWQNNRQKVKVNVLKKEKDTDRVLKGGIFGLYTRNDILSASGKVLMEADTLIELKTTDADGKISFIADLPIDGTYYVKELYAPDGFVTTGEEQEFVFEYQGDKEAEVSYEFVFEDEPTTVELSKTDLTTGEELPGARLQLTDENGGVVEEWTSTEEPHIIKELVVGKSYTLTETKPADGYATAESITFTVENTAEIQKQVMEDDVTKVEISKTDITGDTEIEGAKLTITDENGNIVETWTSGKEPHYIEKLPIGEYTLKEEQAPNGYVVAEEITFEVADTAEIQKVAMKDDTAKGRLIVEKTDKDTGAALKDAEFELRDADGKVVETLTTDENGHATSGLLAIGTYKDGKFDKAATYYLVETKAPEGYQLDGTKHEVTFTYVDDKTPVIEVIQKVTNEKLPEDTPSVSNPKTGDDTNLWIPALCLILSAGGLIGMSVASRRKKKKGGRMKQIDLKDQYFGTEIEMTGISRYDAAVAIGRMFGTEPYHIRSYDSWCVKDSDGKTWKFSRDSSIDCERLANGTVIDADGDYSTEMVSPKLEYSEMGKLQEVVRCVKNAGAFVNSSCGMHVHVDASNHTPRSLKNALTIMYCKEDILFKALNVQTRREDEYCQKVRPMVLEKIRRMPNSTITMEKFKRAWYEGNDGSSEHYNWTRYYALNLHAVFSKGTLEWRCFESTLHAGKVRSNITLALAISAQAINQSCTHAKKTEIGDNPAFTFRTFLLRLGLIGDEYKNVRKHLLANLDGDKAWRYDKSTYACLQNPRRTDDARMGGKTGLYEVGIPIKENTRKGYKMAYEGDSIDLGYPGINSRRGRVGHEIAHTLTTGNQQGTLHFVDISPPPLVTDVARCLNTRQDSSIHNHRGESSGVLVEEAPRAVLTPAKEKVRQNGRRMKEPEEPMFTITATDRHGVIYHGRIRRLTPRECLRLQGYRDGQISKMEKETSDNQLYKQAGNGVTVNVIEAIGRNLKAVDEEIQSGSPVPEAKGGMQTTTTGCCLIRKESGSAMTQEILKQNECRTLIFYVRDFLARHSQSLDEGKDLPMQEEPFSLKLPDWLQTNDLRIFSLKTYPVCFRMTKGGRFTPSSVRYLNWGIMSNGKCLTARISESPSQGSGCILSDILMEDVPEKYYLSQKQMEQLLYKSMLANREKESTQKKDMEMKNICGKIPVELHEKLKLEVEELGISIPKYLEMVIEEHMTRKGEKTNMADLRTVAVQVTEDLFSRLKAVLARNGMKQKDFLIGLIEDAIEKEEAKWKAESEEAEETEMEDPETAKSEPDEESVEPEAEEPETEALEAETDGEMTEPDEAEADEEPTEPENEEPAEAEPTELETEEAEESEPEEAESEEMFFISIVFVLLSFFYIQHTLKPDRKLFTIPNEYEALKSSQRMQIQMREVKRPVFSFRLNLDNPDHKKAWEILQSVPDGQKSSYLVQVILKDQENNQLEKSIRQAIREELAGVSISGSGESVSKKEEIPSQMLDFLSGLEDAFMQNVLQYNGKFYVCGTGRQTLVRSKTSNDNYYLLTMAAIAQEIRYRRGERKTDVVLAAGLPLASFGREKKGFREYLFRKEQPLRFRYEDESYEIRIQDVKLFPQGYSALALHPECVRDEPSVLLADIGGWTVDLMRLDNSVPNAATCRSLELGVIRCVDEITEQVRRNTGLSVTDIQIERVLNGQSCSMDPAAKEIIVRQGRLYTEKILSAIMEAGFDLKAIPSVIMGGGASILKRHVTPQDGLCRQIYLTDVHANASGYERIVGQMCAKMDLKEFYFQNIKESEYHYRFLESVKKVNYTYNIFCGEEETQNYQFEIYDVEEAITKFKELCQPDVDFSGENKCWFYLITYYLHMLGYEIKEFPRILARPPVDPTDFTYRDIRNRIIALGGDDNGTVRYATRRTFVADLTFEQKSCNIEVNDSINQKFIEISTRQASFNSMHIDEKIAEIANLIENLLKQDGKFITPEYEDVCCGFIDDTIVKNYRKKMQCFRHCTDEAIEKRKTYSEEQKNFLVDYGLTMVKAIHELVKMTEQQYKDLLIATAKMSDYEHKDEVVEALKVASVSFQKEWTFTYHLPDHRQEYIIISVVPDKLIVLKEHEDFVDDLCKQVYEPNDYNEYSGLVLKPGILNIAPEEVSQEILFDDIQNRIIDEIREAKFSIWIAMAWFTNKKIFDELLKKRNEGLDVKIIIDNNRVNKEKPSFTLEDHFEVYRVDVMSERYKNIMHRKFCVIDLEVAMHGTFNWTNAANYNKEHWDVDHNRETAKTFAEEFVKMRRDAELSMLWLDFMEQAKIEQLAFLYLCSEHDKRLLLKKEKMPLADFDRLTYLIYHLGFKEYHIKVWMEFAGDFQKEWDCLEALQETGGCVGNIDSTESEVKLHEMWIQDFCKSTPKEIGEWIQDLDYKMPKPRTQSGEKNLISQRLIELRKTHNMSQRDLAYKLQLAGYDMDKNVITRIETNKRYVTDLELKAIAEIFQVSYIFLIDGKDEMTTQPDIIWNEQCLGIRIGEQVCTYLKKHDAEYQRLQNKILELTEKYPVIETFMESNESISLKTEEHKALHRYFQLESEKEMIEEQYHFYMGQAQMISYGAMLGKIKKAILGKDDGDTQKLLELLMDTWIDDVEEQLKENAVYQEMLEKISKYEEQVQTMGLSKEKRKTIDAYVTEVSERWILYAESLYQAGMQKILELLNLMAVKQTAGREALGEFAPKFAELNDDVLFGQVWSREDKLSLRDRSIVTVVALMAQGLTDSSFQYHLTTAKNNGVTKTEIAEILTHSAFYAGWPKAWAAFRMAKEVWAEDDAADAKAKHQNEMVFPIGTPNDAFAKYFIGQSYLAPLSTQQVGIYNVTFEPGCRKLDYVAMNKKVLIISSSPRKGGNSETLAAAFAKGAREAGNQVETVYLREKQVGFCKGCLACLKLGHCVIQDDAVEIATKMHDADVLVFATPVYYYCVSGQLKTMLDRANPLFDTDYVFTKVYLLATASEDAPETFAGTEKAVQGWVDCFPRCALAGTVFAGGVNGVGEIAGHIALEQAYQMGKEVMYSIGQVAEMFGLPISTLRYYDKQGLFPNMERVSGIRKFGDTEIEALRVIECLKKAGMEIKDIRQFMDWCVEGPSTYPQRKALFEEQRSHMEAELEQMNRTLDMLKFKCWYYEQAIKDGSEDRLKSLIPDHLPEEIRKAYENAHSMKSYLSLIPISAKVHRRQNRMTLLCIVFAVFMVTAVFSMAEMGFRMEQARLVGKHGGFSIGDLLGSSMGQTLLSVAVALFLLILVAGVLMISSSMNSSVAQRTKFFGMMRCIGMSKQQIIRFVRLEALNWCKTAVPIGLILGVVTTWGLCAVLRFVVREEFSDIPLFDISIFGIVCGIFVGLVTVLIAANAPAKHAAKVSPITAVSGNADHGKTMYHCQYTGFGKIEALLGIDHAVSGKKNLFLMTGSFALSIILFLSFSVMIDFVDYLIPQSAATSDIDIASDDGNAIPRELLTSIRAMDGVREVYGRRSAFDVPARLNSDTGFSDTTDMISYDDFDLQCLKKDSALKRGSDLSKVFGDSNFVLATSDQDSTWKIGDTVQIGDETLTIAGLLKNDPFSENGLTNGKLTLITSDETFVRLTGEEGYSLVLIQTTGDVTDENVQAIQNSVDQTYSFRDKRDERTTGTYMAFVFCVYAFLAIIALVTVMNIVNSISMSVSARMKQYGAMRAVGMDERQMTKMIACEAFTYAVFGCVVGCAIGLPLSKSLYDFLIAGHFPSAVWQFPIISLGVILLFVSIAAIAAVYAPAKRIRNMSITATINELMNLLEVKNICKTYGSGETTVKALKDVSFSVPKGEYVAIVGESGSGKSTLLNMIGALDTPTSGKVLIDGKDIFSMNDKKLTVFRRRNIGFIFQAFNLVPELTVEQNIIFPVLLDYQKPDKKYLEELLTVLNLKERRNHLPSQLSGGQQQRVAIGRALITRPSLILADEPTGNLDSQNSSEVIALLKETSKKYEQTIIMITHNRSIAQTADRVLQVSDGTLTDFGRCREMKILANKEIKNLFLSLSLVLGVTFLLAEVFLWLSHRRLSLLLLILFLLAGGAVWAVCFVYFNRQNQIMEQAILQINAYLDGDRNARIECDNEGELYRLFHSINSLAAVLNAHADNELREKEFLKNTISDISHQLKTPLAALNIYNGLLQDEDIEVSSVKEFANLSEQELDRIEVLVQSLLKITRLDAGAIVLEKNAENVADMMRDIELHFAYRARQEKKEIILSGSDHLSLFCDRDWLNEAIDNIVKNAFDHTESGATIRVAWKELPSGVQIVITDNGCGIYPEDIHHIFKRFYRSRFSKDKQGIGLGLPLAKAIVDAHNGTIEVDSELGIGTTFTMNFLIPTKLMSDILLLEDDLSLINGLSFTFKKQGFELNIARTLKEAEELWTDGKYDLLVLDVSLPDGSGFEFCKRVRFTSKVPIIFLTASDEETSIIMGLDIGGDDYITKPFKLGVLISRINALLRRANSFQAADTELQSNGIKVLLLQGQVFKNGELLDLTAAEYKLLCLFMRNPSMVLTKGQILDKLWDCDGNYIDNSTLTVYMRRLRMKIEDNPSEPQMLLTVRGMGYKWNIIGMDYMTLKEAAEKWGVTPRRVNYYCAAGRIPGAVKMATIWLIPKDAEKPIDGRTKQGKAEKYEMRLFFAFFVSVNNLGISIATLDAARNNGLISYVQYVQNGCVYFTSAGLMKKINLRELYPDVYVTDFFVDVTEEVMETIRAAERAEAAYERKMYRYKAQYSLDCENGIENAVLLKSQTPEMLLEEKQFQEQVYAAVMKLPEKQAKRIYARYYLGMAVNEIAEVEGVDPSRVRDSIRRGLKQLVKYFMLFLTDVDHVSFEKANETRQNNLQSATVSLLVVIGLCKRKETAALKIKAAVSNGRVKLSALRRLFFFCRRPADCSFILYLYAIWKVCRFHKDLKKMKKTTSLKASFWKFLCMLLIGLIGAVAIPFSLILAGTSTGLITYADYSERCTKDLAPVIAATPDLADVQLPMGCEYLVLDKNYQVTETTLEGDDLDRAMEYAISGKINSNLNKQYLFVTRENEYVVLQYYIGSQFTNEWLYGHFPSPEILLYIFIAINCIAVCVILTAKFAKNMRTQLSPLFEATRQVAEQNLDFEVGHSKIKEFEDVLCSFANMKDNLKISLEKQWNAEQLQREQIAALAHDLKTPLTVIQGNIDLINETELDDEQRLYASYITESSEWIGIYIKALIDISRTIAGYQLHLEKFDIADYMGQIKAQASSLCLTKGICLQLETGANLGTLKADKLLLERAIMNVISNALDYSPPQGTIYVTVQKTDCFLHISITDEGGGFTPEALHHAQEQFFMGDKSRTSNMHFGMGLYITSSIIKQHGGQLVLSNFKRTGGAQVIIKIPYMAAILMIDDERAILELVKNGLRKDGHFVTTYTSAAQVPLDKLNRYDLIILDIMMPDVDGFSYCDKIRSLVDCPILFLTAKTMEHDITFGLGLGADDYLTKPFRIAELRARVNAHLRRERRERHTALTFDRIKIDLSEKELRVDNTPVALTKSEYLICEYLARNKGQVFSKEQIYEAVFSLEGDSDNSTISTHIKNIRSKLNKLDIQPIATVWGIGYKWEMNKSKKIMLLLLFTFIVCVALAGCTLQDRIEEYSSDKEQCYLNTENVTRFSYKGNDYTILADTVSNGGLGEWIGYIRQLAAIDENGKILLQENVEPATFQFLADLAEKAPEAAYIIPFLNVYAAPNADDYLIVDINGGYHKAVISENVKDSDTVFDFKKTEESINDSFEVNPENATQLLWGGTVYQVTSDMVSDDELGSYIDILAESVTFDTETKIPLSKEDLSKIDWYGENAGQGRESWFYTDVYEIYGTDKAEAVAVNVNDNYYIAKRQMGFIYALRSEQEKTKHTSFWAIHFCVPVMGALLFLAYYSQYASTADSKKLKMILEITTTFFPVLISVIVGLNVALEEKASHFQTLLAVPNRHKNMLAKLTYLYGSGVFALFFLFLLFVIGIHLLGMADTVQLGMLIGAAAGMAFCNFIIYILHLFLSFKFGLGLSLFWGVFESLQCILYSNIELKGVARYIPFAWSMNWVQDILSRQIFNYGTEKIWIAVLTTGGLLLTLLWFSHWEGRKNYEMDYLKSEHLKFKRTISNKLIFIVPLITAIFAWLMGGYMGYQYMTLYWWYAFLLPGAIAILCSLSHRKEENAGKYYSVFSMPVNLSRFEFAKGIILVEKLLVSAIFLALLISISNIIAPATAVYSLLHSITGSIGIILASVWQIPLCLYLARKTGMFVPIVLNTILGIVLSTATALGNTIAWWFVPYCWAAKLAEPLMGIEINGTYAGNCGFSIAIMISISLSILLFLILSYADAKDFSKGRMSIILKTTNLCKSFNGQTAVNNISLNIERNSVYGLLGPNGAGKSTTLKMITGILRPTSGSIEFDGHAWKRSDLNHIGALIEMPPLYENLTAYENLKVRTTILGLTDKRIDEVLQIVRLTETGKKKAGQFSLGMKQRLGIAVALLNNPKLLILDEPTNGLDPIGIEELRELIRSFPAKGITVILSSHILSEVQQTADHIGIIAGGVLGYEGKLNANENLEQLFMDVVKSNHREGMKKVNLRDLYPDVYKTDYFVEVTEDVLETIRAAERAEAAYDRRMYRYKAYYSLDCDNGIENAILLKLQTPEMLLDEKQLREQLYTAVMALPEKQAKRIYARYYLGMRVSEIAAAEGVDPSRVRDSIRRGLKQLAKYFMADIILSNICKRFGEKTLFENFSLKIERGEFLSIMGESGAGKTTLLNMMGLLDRPDSGIVVLCGQKNPAFSSCTAVNLRRRHISYLFQNYGLIDTETVENNMRIATHFKSISKKKERRLIADALEQVGLQGYEKRKVYTLSGGEQQRVALAKVIAKSPQIIFADEPTGSLDECNRDYVLEILQELNYQGKTIVVVTHDPHVNECAQRHIMLKAIQKSKEAEAYTRAMNTIRFSSEQKAHIIKCVADEKEQSNKSMKKLMTFCFIILFSVLSALSCFNFAFDALDRIERDKITIVIEKPSNISATDFLGEIERVTEELHTDIMLRRVENRNGKAHYQYFKTSHTADFLKISTSKGNAQLGNGECISTITPAGYNVHRLNASALMQDISFYPLGDAKQYDLSAATYYVRMGQQSSIIDAITQLGYVVTVNPTSYISGQFSVLLFGFVPAFMLVASMAFYILSNGKKNVLKKMEGYTTHDVLADEVKSIFPIFAICFLIIEVVSLIVAAALYQTALLQYILFSLPNIAVLLMVVLCGFGLSALLVCRQNSAEHIKGRVPRRGIYFTTILAKGVFVGFIIFFLSIAIRNVTISYHTMQTSQFFADKVSGYVTVLVNTSNASMQNLNENYKAFYSATVNRYNGILVDASNYEYNLINGRTPAEEFGQTSITVNRNYLDFNPIYGTDGKQISDTQLSVTDFNVLLPVSKEGEKEKWCEFVQTAYGMKANFIPYDGSNNKVYSYNANTGTGDHGALDEPVILVIEEEQLEGIFVISYCSKGAYFLNVPTENAYAELLPTLQETGIASVTLETPPVASSFLETINHQRQMLLLYGTQSVVLLIGLFCLIIFSAKLYCENYKNKIACCLIEGYSMFHCIRNHLIVTVIYYVVVVVGLRFVSMTMQVSLNYLLLLVAFIGELAITLSVSRRYTQNNLYQIVKGAEMSKQKEQGTGSRLFHKRLAIKTTIQFITIIILFEVAYILLNLLFLIIMGATNLDQAEAFQAFKPFLIPIMVVVSIAGCSYISYRFMLRPLEHLDEVAEAAQKLAHPTDAPIILSGNLKNMEDDLNRVREQTLQSLKNAQIADQRRDDLLVYLAHDLKTPLTSVLGYLKLIEDEPEITPELVCKYTGIARKKAQRLEELINEFFEITRFSTQKLSLELTQTHLSRMLMQITYEFNPILAEKGLEWDLQIAENIEIMCDADKLERAIDNLIRNAVNYSYPNTKIFFSLTQISDGIRICVQNKGQTIPPEKLERIFEQFYRLDAARSSDTGGAGLGLAIAKEIIELHHGTIATYSENENIQFIIHLPFGSQKIVRSMNMSCKSETIVIVDDEQEIADLLEVYLKNESYVVRKFYNPLDALACIEKEPVSLAILDVMMPEIDGFSLCQKIRQKHLFPIIMLTAKIADIDKIQGLTLGADDYIVKPFNPLEVVARVKTQLRRYKQYNTNQSDPTAEPAEYDEKGLYICPASHKCTLNGVVLPLTPFEFNILWYLCKNHGRVVSAEELFETVWGERFFESNNNTVMAHIARIREKMSEPARKPKYIKTVWGVGYTIEMDYMTLREASEKWGISTRQINYYCTEDRIPGAVKMAGVWLIPKEAEKPSDKRRKNPMPIRELSGNISLKRNGGCKLTCVRDSIRRGLNQLSKYFMPIDDLTALGQKMREARKKKDLTQQELADLRHVSVKQIANIEKGKMNPSYLILRALAKVLHISLDTLINPDISLEDEGVNQMKMLYSSCPPEMRDTLLHDTQETVKELTELSEKFETNMNYLSEHNLLEYAVLEEKAAAATAHHNELSAQIKAAEKRMAEIAVLRTHIVNYAKTREVYVAYRKAGYSKKFREEHEEEILLHQAAKNAFDEMGVKKLPKVKELQTEYAKLLEEKKKIYAEYRRSLEEMRELLTAKANVDRVLKMEVEQDVEKEKDHGQRMATTRIMPLHVGKGRTESRAISDIIDYVANPKKTDNGRLITGYACDSRTADAEFLLAKRQYIAATGRVRGIDDVIAYHVRQSFRPGEITPEEANRLGVEFAKCFIKGNHAFVVCTHIDKSHIHNHIIWSSVSLEYDRKFRNFWGSTKAVRRLSDTICIENELSIVENPKPHGKSYNKWLGDQAKPSHRELLRVAIDNALSQSPADFEELLKLLQEYGCEVSKRGKSYRLKLSGWEKAARMDSLGEGYGLEDLRAVLLGKKAHTPRKKTVTQAEPPKVNLLVDIQAKLQAGKGAGYARWAKVFNLKQMAMIEQLIAEATECDFKVALETKKPKSWLKSVSAFSNGIGGTLFFGVSDDREPIGLSDVQKDAEAISRLIKERITPLPQFILKPLQEDGKNLLALEVSPGRSTPYYYKADGVMEAYIRVGNESVIAPDYIVNELILKGTNQSFDTLTTDAVKKDYSFTLLEATYLERTGLRFEPSDYVSFGLTDKNGLLTNAGKLMTDQHTVYNSRMFCTRWNGLEKGSIFDDALDDKEYEGNLIYLLNSGSEFIRNNSKVRFVKKAQYRVDKPDYAERAVTEALVNALIHRDYIVLGSEIHIDMFDDRVEITSPGGMFGGGSIQEYDIYSIRSMRRNPVIADLFHRMKYMERRGSGLRKIVSETEKLPGYTEAYKPEFSSTATDFRVILKNVNYHLSQKDLVSDQDCDQVSDQDKSQDILHAVLDFCITEKSKQEICSFIGYRNLTYFTRKYLNPLLASGQLKMTIPDKPNSRKQKYITVRSEMKILKCLLMIVTAPVVLVLTLFVWLCTGLIYISGLVLGLLSTIIALLGVAVIITYSTQNGVILLVMAFLISPMGLPLAAIWLLGKVQNLKFAIQDWVYGMLTVNALAAANRIIIPVQAEYLPAKGLEQLLSTVSKVKRQINPKLQIDGILLTMVDNRTNFAKEIAALLRDTYGSKIKVFGTEIPHSVRAKEISAEGKNIFAHDPGGKVAEGYRNLTKEVLKLEKQREKRRLNMNTQMIAIANQKGCYVPVAHIRHRPEREWRSIGKTTTCANLGIGLAQAGKKVLLIDGDPQGSLTISLGNPQPDKLPFTLSDAMGKILMDQPIRPGEGILHHAEGVDLMPADIQLSDMEVSLVNAMSREMILRQYFYGNIWIHMASVKYYGTGRRKKSIARVYLTPGTGKITINKRDIDEYFGLETLKVVVRQPLVATETLEKFDVLVNVHGGGFTGQAGAIRHGIARALLKADAEFRPTLKKAGYLTRDPRMKERKKYGLKAARRAPQFSKRMKSFVASPATIERKWYVVDAADQTLGRLTSQVAAILRGKNKPTFTPNVDTGDYVIVINADKIKVTGKKMDQKIYYSHSDYVGGMKEATLREKMAKKPEDVITLAVKGMLPKGPLGRAMIKKLHVYAGPEHNHAAQKPEVLELKYMKKKTVSDSDIKKYLKIQKHNLSNIYSQEEVSRILSFMRNDIYDYIQNHPGCQINDIDAYLKISDIYSDWIANSDVSDIIEKIDHESISKSGGRFIVVMVLLIILSYITYTGIERYIFDTSWNTMQQVDINAPEVNRMVYQKRKINNYLKSIRKQLSLVYSEEETDNIINMLNEQTHNFITDHPSASIEELREHLMNNNQFVKYGLENIDPKVIERDIDITRRLRKRAKVISIIALIIFGVFVAGGIYNVIYVKQNSIAYYTEEIIDYGDIPSTDETDSTEFSSESPSESVEMARSSLYCPAQIKNFMLVAILWCIGLGIQKMDSRRLKKMQAPKENTISLIEPTLTLLVQYLMSKGWKVFPRKRQDIKVLQIRKADGSFFQVTIPLSRALSDYGEALSIALETVAEAEDKTVNMAVKRKQSNPIIYRLTQEADGFNENSPMNEYWDPDKSYDDNKYIRVAIHLITCIMSKMYLVKPDGIDAEWNATNYGENEYTQLSMKMIMPTEKSSETYGIFQELLFRLGWRANDTDICPMNMEQCHSLKVCKRCLLLLLLKKEEDNWRKTQPDFIWKEKQRLSLCVTGNGIGKGYVSIYGYMLKDQVKELVDTLSARFEITEASIQDTILDIPDLEYEVKLREKKDIARKRVFEAFMTGDERKFKPFFTTCNELSQIFSIRRLSELTADVSWVAYKFVASIAEEMAEEGLLVRTDSEGFMRSLMPDEFIPWLMGKAILLFSDGYSISEIARGTEAESRKIMTNKYNDAADNVEALWLEQSYCEENDAILYMNGEDVFIWKVICFMKFVVKHEIKGRIRVHFCQKRMTFEEADTLQYYLDSQEMITSSKVQERTQDATICYTGEKSAVIALLRSFHYEKVDVPDVYRQNSGRETNREYWDKLVTKVVVHYGNKLFLPMPIRTVITGVKSVKYIYQGIHTLLQRKIEVPVLDATAIGVSMFRGDISTAGSVMFLLGIGEILEEWTHKKSVDDLARSMSLNISRVWLCNDGQEMLVPTTEIQTGDLVRVHMGNMVPFDGTVAEGEAMVNQASLTGESEPVRKYIESTVYAGTVVEEGELTIRVKETNGSSKFDKIVTMIEESEKLKSGLESKAEHLADRLVPYTLLGTGITYLLTRNMTKAISVLMVDFSCALKLAMPISVLSAIREASNYHVTVKGGRYLEAMAEADTIVFDKTGTLTKAQPTVKQVVAFNGMSENELLRIAACLEEHFPHSMAKAVVQAAIDRHLVHEELHSKVEYIVAHGISSKINDKKVVIGSYHFVFEDEKCAVPDGMMEEFDKLPSECSHLFMAIDHELAAVICIEDPLREEAAAVVRKLKETGISKVVMMTGDSDRTAKAIAARVGVDEYYSEVLPEDKASFVEEEKKAGRKVIMIGDGINDSPALSAADIGIAISDGAEIAREIADITVGADSLNELVTLKLISDGLMKRIHKNYRFIVGFNTGLIVLGVAGILQPATSALLHNTSTLMIGLKSMQDILMLKCFKKINKKDTGVFAAGLLFGTAGIKLLSSKDAKKLYTNCAAAVLRAKECVLKTATTIQENAEDIYAEAQQINEERAAKDAEEYTDVEDVEEAEETAEEASEENEAKMNNKYKILLVEDEQNISTLVMTMLETAGYQVIPAGTCAMAKTLFISYCPDLVILDLGLPDMDGMTFLKEVRKNSLTPIIVLSARTNERDKVLALDSGANDYVTKPFGAAELLARIRSALRNCSHSADSGKLPGGRFSVQDLEILYDARQVFIKGREIKLTQTEYNIVALLSEHCGKMMTYSAIIKGVWGYPDEGSVKKLQVNMANIRKKFGVKPGEATYITNELGVGYRMNSDMKKKRHHLWKNIMIMAAVFLVASGSSIILQKTGVNEHITAIFIFAVFLTSILTDGYIYGIVSALVGTLAVNYAYTYPFYVLDFRFQSNMISAVVMMAIAVLTGMLTTQVKTHEAIKAESEKERMRANLLRAVSHDIRTPLTTIYGASTTLLESGENYTKEQRIKILKGIQEDSDWLMRMVENLLSITRIDEGKIKIIKTPTVLDELIDSVMVKFHKRYPQQEVYLDLPEDIIIIPMDAILIEQVIFNLLENAVLHADGMTELILKVFVLGQQVVFEVSDDGCGIEKERLSGIFNGSYHLFEDKASSADSQKHNSGIGLSVCQTIIKAHDGVIVAENNAKGGVVFRFSLNREETSESEMEIKILDMIQNLHTTVGDHFFIGITKLGDAGIIWIFLTILLLILPKMRKYGLAMLVGLCIDVIVCNGLLKNLVARTRPCDVNTAIQLLISHPTDYSFPSGHTAASFTAVAALYFSGDKKIWKAAIVLGILIAFSRMYLYVHYPTDILGGILVGIFSGFIGSKIVTYMMKKRANQNEMLRKILTFFHKETVLSISAILAILSMFIVHPSGKYFSYIDFRTLSLLFCLMSIVAGLSEIGLFDYLAEKILSRANSIKSIIVLLVLLCFFFSMIITNDVALITFVPLAIIILKKMSEKQKNYWILRTVVMQTIAANLGSMLTPIGNPQNLYLYARANMSALALIRLMLPYSIAALVLLLVWIQIAAHREPGSTTENHISELFSIHKTKAPNQTSLIGYLILFLICLLVVARIIDYRISFILVIGYIFFKNWHLFKKVDYSLLLTFTALFIFIGNLKCIPQFNHFLISIIDGHETLTAILSSQIISNVPTAILLSGFTKNYSALIIGTNIGGLGTLIASMASLISFKYIAKEKTTLRGKYFMMFTIANIVFLILLLLCINLLMAITAAMVKELREMTGAGMMDCKKALNEVDGDMDKAVEFLREKGLAAAAKKASRIAAEGIVATLVSDDKKSAAIVEVNAETDFVAKNEVFQSYVARVAAQVLASNNTTMEAFMAEPWIDDASFTVEQELSQMVAKIGEKLSIRRFEKVTNENGVIASYIHAGGKIGVLVNMDTTAAAEAVEECGKNVCMQVAALKPQFTNRNEVSAEHIAHEKEILLAQIMNDPKESQKPAKVIDGIVTGRINKELKEICLLDQVYVKAEDGKQSVGKYVESVAKEVGAPIAVKSFVRFETGEGMEKREDDFAAEVAKQAGMMSVISMKQLLEAGVHFGHQTRRWNPKMAPYIYTERNGIYIIDLQKSVGMVDDAYNAIKDIVADGGTILFVGTKKQAQDAIKAEAERCGMYYVNQRWLGGMLTNFKTIESRIARLKAIEKMSEDGTFEVLPKKEVIELKKEWEKLEKNLGGIKDMKRIPDAIFIVDPKKERICVQEAHILGIPLIGIADTNCDPEELDYVIPGNDDAIRAVKLIVSKMADAVIEAKQGADAETTEAEAAEADAEMSVQLLDKTRKINKLLHNNNSHMVVFNDICEVLSEILESNILVISRKGKVLGIKNRPDIAELHELIVDAVGGHIDEMLNERLLSVLSTKENVNLLTLGFESDDINTYQAIITPIDIAAERLGTLFIYRKDKPYEIDDIILSEYGTTVVGLEMLRSVNEENAEETRKVQIVKSAISTLSFSELEAITHIFEELDGNEGILVASKIADRVGITRSVIVNALRKFESAGVIESRSSGMKGTYIKVLNDVVFDELKKLMAKYLVIVESPAKAKTINKFLGSNYHVVASNGHVRDLPKSRLGIDVEDDYEPKYITIRGKGDILAMLRKEAKKADKIYLATDPDREGEAISWHLATALKLDEAHTNRITFNEITKNAVKTAIKHPRKIDMDLVDAQQARRMLDRMVGYRISPLLWSKVKRGLSAGRVQSVALRLICDREQEIDAFIPKEYWSLDAVLNVSGEKKPLTAKFYGKKKEKIEIHSQKELDAIMDALKDAAYQIVDIKTGERTRKAPVPFTTSTLQQEASKQLNFSTQKTMRLAQQLYEGVDIQGLGTVGLITYLRTDSIRISEEADSNARNFIAENYGQEYVAAAPKTAESGKKIQDAHEAIRPTYLDQLPVKVKESLSRDQFRLYQLIWNRFVASRMKEAVYETTNIKIEAAGYLFTVSTSRLAFEGFMSVYKPDDEKAENNVLARKINKDSQLSFKDFDAKQHFTQPPAHYTEASLVKTMEELGIGRPSTYAPTITTIISRRYVAKENKNLYVTELGEVVNRMMVQSFPSIVDVNFTANLEYLLDKVGEGVVNYKTVIRNFYPDLDEAVQKAEKELEEVKIEDEVSDVQCDQCGRMMVIKYGPHGKFLACPGFPECRNTKTYFEKIGVSCPKCGKDIVIKKTKKGRRYYGCMGNPECDFMTWQRPSDKKCPECGSVLLHKGNKLVCMNETCGFVMANPKEEDQMEKDEYWLWLGTIPGIGNVTALKLLNAFGGDIRVLYEADKKTIAGRHIVSEKQLQSIIYSRNRDRICRAYAQMKEKGIQCLSIVDTHYPDMLKSLHDPPIVLYFLGSIPAPEEWMIALIGARQCSSYGRQVSRMLARGIAASGLTVVSGMARGSDSAAHWGALEEGGRTFAVLGCGVDVCYPRENIDLYMEISRNGGILSEFPPGTKPEGYHFPRRNRLIAALAKGIVVTEAKQKSGTLTTVEHGLDLGKDIFAVPGRIDDALSEGCNQLIRAGAKLVMQPSDILEEFGILAREYKKNNITLDNSEKVVYASICLVPRSADEIAALTGMDVQCIIHCLVRMELKGIIHRVGKNQYVLSIMDRIDLNIEVLPARIESLQEAASDEERSAQILKRVEQARAMQDARYSGTVYRYNSQLHDRDVERYCALEAEERMLMKNIYEQYDLSARTYHKILKVARTIADLSGHLRITTDDISEAVFYKCLDGRYWGSGNGKGMFSKTISAVLLGMRSDMITVEADVSGGLPYFEMVGYLSAEVKEAKERVRTAIRNAGFKLEPRRIIVNLSPADVRKSGTICDLAIASAVLCAYGFIMPESLEHTVLIGELSLDGSVRPVNGVLSVVLMAKRMGMTKCIVPAMNAFEGAAVDDIEVYGVHTLQELIGFLDGRLVIEPAYIDRDTLLERSEGQISQLDFSDICGQHTMKRGLEIAAAGMHHTMLIGPPGAGKSMAARRLPTILPKMTWEECLEVSEIYSAAGLLKPAEGLITTRPFRSPHHTASDVALAGGGRLPKPGEISLAHRGVLFLDELTEFSSAAMEVMRQPIETGHIMINRLQAMCVFPAGFMLVAAINPCRCGYYPMRAVIQRVSRASVDVDNETIGSIERGFLVLLGVADEDTEEDMAYLVKKITQMRIFEDEAGKMNLSLKDVDGELLIISQFTLFASTKKGNRPSFTEAGAPDFSKDMYLKFIAACRDCGIHTEEGEFGAHMMVSLVNDGPVTITIDSKQRHMYIQADTYDLVIKARGEIDMKQIVCFGDSNTYGYIPENGERYPWGVRWTSLLNEKLGYGKYHIEEEGLCGRTTIFEDPLRDNRNGSHMLPALLETHQHADLIIVMLGTNDCKAAYGASAEMIGKGIEKIVGQIRGGAPDSKILLISPIWLGEKVWKPGYDPEFSEKSVAVSKHLAKVYRQIAEKENIAFLNAAAYAKPSAADQEHMDPENHRLLAEAIYQKVIEIEGIFEMKLKEIAHSRTGDKGDISNISLIPYKKEDYEMLKEKVTPEVVKAYFGEICKGEVVRYDIDSICAMNFVLDKTLGGGVTRSLAIDKHGKALGMALMEMEIMKKIRIGSGAGYAGDRIEPAVELMEKGNLDYIIFECLAERTIAIGQQDKMKDPTKGYNQLLEARMRKILKLAKDNHIKVITNMGAANPVAAAEKTAEIAKELGVSGLKIAYVTGDDITPQIEKYYDNDVLELDCKLGDIKESILSTNVYLGAEGIIEALENGADIVITGRVSDPALSIGPLVHEFGWNIKDDADKMGQATLVGHLLECAGQVTGGYYADPGYKDVPDLDRLGFPLIEIDETGKFVVTKVEGSGGLVCEDTCKEQMIYEIHNPERYLTPDTVADFSHVTFTQVGKDRVEAAHATSHGKPETLKVSVGYKDCFIGEGEISYGGMNCMNRAKLAADIVEKRLKLVGVEMEEFRIDYIGYNSLYKSEISDQYAPDVFPEIRLRVSGRTKDKANATLIANEVEALYTNGPAGGAGATKKVSEIVSICSIFVPRDIIKIEVGYKEVMLALIGVLTIVIMLVLIMTKKLQTLLALIIVPIIGCLVAGFTGNIVLEEGVFTVKTMGEFITAGLKSIAPTGVMFIFAILFFGILTDAGTFDPIIKKILQVVGKDPVKICIGTVILACLVHLDGSGAVTFLIAIPAMLPLYEKLGMRKTTLATLVALGAGVMNMLPWGGPTIRAITAMSSNIEELFTPMVIPMICGLAFVLGVAVFLGKSEKKRLGAALDAVQLDDSHHEATEADELKRPHLFIFNIALIIIAVVVLIKSILPPAAVFMIATAIALLVNYPDKKMQSERVDAHAKSALMMASMLFAAGSFIGIMQNSGMLTAMAEAIVKIIPASVGQLMPVLVGIISMPASLLFDPDSYYYGVMPVLASAVEQMGVNPIMIARASIIGQMTTGFPVSPLTGATFLLTGLSGIDLGEHQKHTIPFAFMTTIVMLIVAVIVGSISIMREKDIYEAMNQGVLLCDEKSRILYFNSSYSRFIGYRLEEICGKPIRDIRPGAVVPDVIANGKPQESLFRVENDQEYFADVYPVMEDGQVVGSVSVVTSMMNANCIKDKMLKLEEQEKVMKDRLSRTNGTHYSFEQIICSSPKTLETIAKAKKVARHPVNILLQGESGCGKELFAQSIHNESDRRDAPFVAINCAALNKTMLESELFGYENGAFTGARKGGKPGLFETAKGGTLFLDEISEMDYDLQAKLLRVLQEKKFRRIGGLQEIDTDIRLISACNVNLQQYIEEKKFRMDLFYRIAVFPLTIPPLRERREDILPLMEHYLHIAQIQNKQNYTFTDEVKERMYCYDWPGNVRELRNTVEYCALMALGTEITLDCLPPSLLQGQQVMQEEDIIPLDQRIREFEKNEIMHTLDIYGRTTDGKKKAAKALGISLSSLYNKIGKSETMAGYKVEICGVNTAKLPLLKEDEKEMLMKRIKSHDLRARERFINGNLRLVLSVIQRFSGTNENVNDLFQVGCIGLIKAIDNFDLTQGVRFSTYAVPMIVGEIRRFLRDNSAIRVSRSLRDTAYKAIYAREALITRNNREPTVMEIAEETGIPKEDIVFALDAIQSPMSLYEPVYTDGGDALCIMDQVSDRKNGENSWVENLALNDAMKRLSHRENRIIKMRFYEGKTQMEVADELAISQAQISRIEKSALQNMRTYLRAMKFRPCIDIHNGKVKQIVGGSLKDEMNQAIDNFVSEQDAAWYARLYREKGLIGGHIILLNPEGSEYYDADLVQAMGALEAFPGGLMIGGGIHSDNAMKFIRAGASHVIVTSYVFKEGKIDFEHLKAIHESVGREHLVLDLSCRKKDGLYYIVTDRWQKFTEHVVNEETLNLLAPYCSEFLIHAVDVEGKASGIEEELASMLGVWDGIPITYAGGVGSLDDVELLKKLGNRRLDVTIGSALDIFGGTIPFEKAADISMRICELREKEVINIRDCQRLGRVLDIEFDLHTGVICQLILPGPSRFCGFFGRDAEYLIGWKCIRQIGADIILVDVDLEKCMQKPTNMKCPFCSAEDTRVIDSRPTDDNASIRRRRQCPVCGKRFTTYEKIETLPLIVIKKDNNREPYDRSKIEAGIVRSCHKRPISTAQITAIVDDIETALYNREDREIPTMVIGELVMDHLKDLDPVAYVRFASVYREFKDIDTFMDEIKSLLSSNMKNKHKTLIAAAAMQGIMLGFWSAGWLCWVCENVGLSPDFLMLLAAALIFCLIFEIIQILQKLSIACPAAMGILAVSIYTNRTKAVSGLNAWLNDFSDAVRNYYQIDLQLSAGKTEAAESMFFYVLVLGILVLAVGYAVSIWRLKRLPLFFTGLVLAMSLLLNRFPDIRMMVMTTVFCGGLTAFLSASVSGRSRIFNAKAMKNGLFALVLMAVIFGSSYYIADTFAAEYMRSHYEAVKKYPQTMMAASEQVLSVFLGDREWQVSNHSPVQSGRTKLKIWTDKKPEAAIYLKGFVGDGFNTQTEQWNVITDNSLQNEYQNWTVSDSLNYDEAKALWAKQLYDCLDRLSDETGTVNYIISNVSAGKMCTWAPYGIDTDGIEMEGDSYLKSSSNREFQGYPLTDNDVLLSNADVSGIFAGDGAALFDIYNRYVQANYLNVPDGLPSLEAAVQVMQDENGDLSLSQWVAQIQNILWETCTYQKDNLESVPDGSNVIEDFFGRQRKGYCTHFASAGVMMLRMAGIPARYVTGYVIWPDDFKADSASDGYMADVTGYRGHAWVEVYNASQGIWVPVDMTPVDSVQTSNYLPTQENSGHSESTDNVSNHYTDSTETISDTGDTGNHTESTEIVSESRNDNDRTEETKTGVNTDISRTNQGISAAVKIVLGMASMIVIAGLGVYVYRRRQNQPRHYSRVNRNKALLAMWAHLTDELDQSGIRTDKEMDDWAYIKWLQSRVQTVKPEELTFLMEKLYQAAFGEDMLSEETYEQCVQICCRIQREIKKKMMIRWMIYLGLLIFAAYESVVFEDAAVTMFFVAALLLFVLLLLLLLIQRQMLKVSMKIPVPAAEKNKGVQLLFRLENRLPFLIGSIHAEIICLSHFTGKKEKYAVSFDNGRKQGTAVTTVCQIFGDNCGKMHVFAGRIQIWDIFHLFCLTKKVNLTGEITILPQIYDTAAAISEGVRHFAGETEEDEPEAAGHDASQTYQIRPYRPGDRLQTVHWKLTARNDELYVREAGEPICLAVGIFIDFYAASKAEKQHMAALIEAALSVSNALLEQNCRHFIVWYDLEGRHLCKQRISKIEDIYEVTGYLMSAACYDENMDLKVMYKEAFPYGLYAADITLRLSGDILTADEPVGHFDEKDMETSMEKCMLRVMEKIRMQSVNLQKANAVMAEVKKAVIGKDTCILKVMAAMIAGGHILLDDIPGVGKTTMALAFSKAMDLKQNRVQFTPDILPADIVGFSMYEKSSGKFVYQPGAVMCNLFLADEINRTSPKTQSALLEVMEEGSVTVDGITKPVPNPFIVLATQNPVGSAGTQMLPESQVDRFMICLTMGYPNPEDEIAILKGKSAGDPLNDVMKVMDAASLLEARREAEQIYVHNAIYKYMVRLVNRTRNNDMIELGISPRGTVALAAMAKSCAWLRGRKFVYPDDVADIFYDVAIHRIRLNAKARINHVTAEGLIEQIINETERPTVRRKNVMRTINYAGYRMVRGFRSIIYKSNGEIHYISGTDVLPVPLEGEEEKNAIAMLATEAEREHGRNILIEHNLRLVVYIARKFDNTGAGMEDLISIGTIGLIKAINSYNPDKNIKLATYASRCIENEILMYLRRSSKLKMEVSIDEPLNVDWDGNELLLSDILGTDENVIYNKMEEEVNYHLLYKALAKLSPREKTIIQLRFGIRTADGEEKTQKEVADFLGISQSYISRLEKKIIGRLKKDIVRMEGAMYEPIRRKPVSIIGKELAARLFEGEMEWDTRFRLIPYSSIGVENGLLRGFVADELIVFEGRYFFQTSYPVLAVAKQPFGKTDGYEIILHPNMVMLEIKPNENEAAAKILVIGVGGAGNNAVNRMVDENILGVEFIGVNTDRQALQLCKAPQLVQIGEKLTKGLGAGAKPEVGAKAAEESMDELTELIKGADMVFVTCGMGGGTGTGAAPVVAGIAKDLGCLTVGVVTKPFRFEARQRMNNAIQGIERLKQNVDTLIVIPNDKLLEIVDRRTSMPEALKKADEVLQQGVQGITDLINVPGLINLDFADISTVMKDKGIAHIGIGEGHGDDKALEAVKQAITSPLLETTIEGATDIIINISGDIGLIEANEAAMYVEELAGESANIIFGAMYDDSNPDSATITVIATGLEEEKKVETPQKPGYAKKPLYQTSVGSNTYKAPTGSPVPPSFVQQNQSAKKPAGTTGNIQIPSFLQKKMTDTDREMQESQRRKRPGKQKKKKKSMKGWLVLIVTVGLILAVVFGCRIKTIRITGNERVSDETIQTLIQYDKCQNNSLLLWLLNRKTDISSEPLLNSIHVQLRNPQTIVVQVNEEKLSGYVQSEDEYIYVNDSGKIVLKQTEKLQDVLLLSGITADTAEVGEQLVSDDTGVFADFLDIAAILRSEAITADSLGKSDDGGYYIVMGKVKVLLGKDIYMEEKISELNDLLSKLEGLSGTLHLEEYDSTKDSIIFTKDSMSHIKIRGGHSLHGEIEVQGAKNAALPIIAASVLNNGMVRLRRCPQIMDVHHMLRILQQSGARIMWDDGDVWVKTDQMDTVAVSSLDAGKMRSSIILLGALLGRGQEVTMPYPGGCTIGARPIDWHIDALRKMNVQINLKENKIECKTTGLKGNRIELPYPSVGVTENILLAAVLADGVTEIIHAAMEPEIADLCRFLKKSGACIEGEGTERIRIKGVKTLHDTEYTIMADRIAAGTYMAAAAAVGGEIVLKGIHIENVRAVADVLVESGCGLIIYKESIKIIAPSMLLAVKEIETEPYPGFPTDMQSQMLACLCQARGDSTVTEHIFENRYKVVPELIRMGGNITVDQRRAVIHGPCRMHGETVEAKELRGGAALVIAGLAAEGETVIHGSEHIERGYQDICRDLGQLGAEICCITDHTERRWEDNMNRKRFVGDWAMLGTVFGLILFGLLMIYSASNYTARLHMGNAFYYVERQIFTVLLGTAAMFLMMKLDYHRLLKMALPLYGLSLLLLAAVFVVGTASHGQKRWIYIGSIGFQPSEFAKFVLIIFLASICGAAGNMMKKWKGILLVFLWMMPVAGMVMVTNLSTGIIIMGIAFIIIFTASRQWLPFFVLMGLGGGFMGIFLKLASYRVGRIEAWLNVETHPKGYQTRQSLYAIGSGGLFGRGYGKSIQKLAYIPEAHNDMIFSVICEEWGLLGAGIIAALFIFLIWRCLITANSAPDIPGALLTMGVTAHLGLQMLINIAVVTNSIPNTGIPLPFISYGGTSLIFLMCEIGIVQNIAQQGKTYISMHIKIYHRRKMLIVATFIVGIGLVLMGRLAYLMIFRSAYYQSQADALHERERSIKAARGLIYDRNQRVLADNKSVCTISVIHNQIKEPEKVIRVLSEVLSLDEAKVRARVEKVSSIERIKANVDKALGDKIREYKLDGVMVDEDYTRYYPYKTLASKVLGFTGGDNQGIIGLEVQYDAYLQGIEGTILTTTDARGIEVENTSEGRVEPIPGSDLYISLDYTIQSYVQQVAKRIMEQKEAKSVSVILMNPKNGEILAMTNEPEFNLNAPYLLPENAETDAIQDALNQMWRNGCLNDTYEPGSTFKIITSTAALESHVVSQNDRFYCPGYKIVDDRRIRCHKISGHGSESFVEGLMNSCNPVFIETGLRTGVQVMYQYFDRLGLMEKSGIDLPGEASSIMHQIDNVGDVELATISFGQSFQITPIQMLRAVSAVINGGKLITPHLGVRIVDAKGNMIRLHYNEEAHVIGSEVSDTMKALLEKVISEGTGKKCFIEGYRIGGKTATSQKLPRGSGKYIASFIGFAPADNPEIIGIVLIDEPTGAYYGGTVAAPVMREIFENVLPYYLGQWPDIESDSGDGNEMADKKIRKFSKTNRRRLLVVFLFVLICFVLLVVRLVQINVKNGTDYEKNVLSLLNYDGQTIPYKRGDITDRNKTVLATSEKIYNLVLDPYVITHSNIDKASEYAKEVLEEYFSISKDDVDTILTQQPDSRYVVLKRKMTYDEKKPYDDFLASEDENDAQKIKAVSSGIWFEESYQRIYPFSTLACDLIGFTASDNSGLWGIESYYNDTLSGTNGRKYGYLTDNVDLQTVTEEPHNGKTVVSTIDINIQRIAEKYISQFMTETGAKNVAAIVMNPNNGEVLAMASAPIFDLNNPRDLTVAGYTEDQLADMTDKEMSDALYTLWRNFCVNDSYEPGSTVKTMTVSYALDQALVDPNEQFYCDGGQTYENDSTFVSCNSVHGELDLTGGITHSCNDVMMQLSDRIGITSFTKMQKLFGLGQLTGIDLPGEASCAGTIYTADNMGPVEMWTSSFGQGYNATMVQVVSAFCSIVNGGYYYKPHVVSEIASDNGNTVQVFDKTLMRTTVSKTTSEWMKNALYETVEDGTGKAAQVAGYKIGGKTGTAEKLPRGGKERLVSFVGAAPIDDPQLVVYVVVDEANAEDQGQSSFASTIASNIFSEALPYLQIFPTEEVTETTNENTSDGSDDDQFDEGADNSDNGTSDDDEMAEKRANQSMAYRREPERYYIDGNTARRLNEQPETPKRRNKAVQSRPKQRTVQHKKRVSVFDLKYTLFLVTSVGITLAACFMYLHSSSVLKKNEQAVTALQSQLQTVQEQNNSLKESLNKTIDLDEIYQIATGRLGMVYAGEDQVIYYDSSNNDYIRQYESIPGGKMTFQHYSVLLNETIEQLDIKENGIYVDGTLGGGGHASAVLQRLGETGRLIGIDQDAAAIEAAGDRLAPFGDKVTIVRSNYSAMPQVLADLGIHGVDGIVLDLGVSSYQLDTVERGFTYREDTVLDMRMDQRQTKTARDIVNDYTETELFHMIRDYGEDKFARNIAKHIVMAREKKPIETTGELNDIIRAAIPAKVRAKGGHPSKKTYQAIRIELNHELDVLKNTLDQMIDLLNDHGRICVITFHSLEDRIVKNIFNTNERPCTCPPSFPVCVCGKKSKGRVITRKPILPSEEELEVNSRSKSAKLRVFERIREMDGFIGEYYHTIDTKGRVIIPQKYREDLGDTFILSKGLDGCLWIHPMDEWREFTAKLRELSTIDKESRQFKRFFMSGATECEFDKQGRILVPASLRKYADLQKDVVLTGMDTRIELWSAEKWDVENDMDDEDMEAVAAHMASLGVNIMTGASIRFPHLGIVIEHLGKSISIFGFDIAYYGIIIGVGMLCGIAMAVHEAKRTGQNPEMYYDFALCAIISAIVGCRIYYVAFEWSYYSQHPLEIFNLRQGGLAIYGGIIGGFICMIIFSKIRKASLLLMADTVVPGLLIGQIIGRWGNFFNREAFGGYSDGLLAMQIRMDEAAYTTQDLLDKAVTVDGVQYIQVQPTFLYESLWNLGVLVIILLYRKHKKFNGELFMMYLFGYGIGRFIIEQFRTDQLLLPYIGLPVSQVLSACLSVFALIVIMYKRSRLKKASKTAAMKLGIVGLPNVGKSTLFNSLTKAGALSANYPFATIDPNVGIVAVPDERIVKLGELYHTKKVTPATIEFVDIAGLVKGASKGEGLGNQFLANIREVDAIVHVVRCFEDDNIIHVDGSVDPARDIETINLELIFSDIEILERRIAKIAKQAKMDKAYAKELELAQAVKAHLEDGKMARTFEVSDDEDEQIWFKNYNLLTAKPTIYAANVAEDDLADDGASNPHVAKVREMAKEEGAEVFVICAQIEQELADLDDDEKKEYLEDLGVSSSGLDKLVAASYSLLGLISFLTAGEDECRAWTIKKGTKAPQAAGKIHTDFERGFIKAEVVNYQDLLDNGSLSAAKEKGIVGMEGKEYVVKDGDVILFRFNVMKIDSLIFDLDGTLWDSSEGIVATWALVLEHYPEIHKKVTAEELASNFGLPLDQIARNMFPEQTEALRMRLMDECCEQENIYLAEHGGILYPKLEETLQKLSEKYPLFIVSNCQDGYIQSFYSGNHTAKYFKDCECIGVTGKSKGANIRLVMERNGLKSPVYIGDTQGDADAAAQAGIPFIYAAYGFGQVKAFDAEIHTFEELLDIVEMSDDKQNRNTRQKSMILEYLKDRQDTHVRAEDIIHDLNAGEERVGKTTVYRVLKSLETEGKIRKYTLSEKSPACYQFSGGHPECRHHYHLMCSECGRLIHFESEHMRQLADEMMAKEDFAVDESKTVFYGCCGECRRKIQKGEEDEDRMNISGMVLGLIGGLGLFLYGMTLMSDSLEKAAGAKLRGILELFTKNRYVGIIVGVVFTAIIQSSSAATVMVVSFVNAGLMTLYQAIGVIYGANIGTTVTSQLVSFNLSQYAPVFIMAGVLMLMIFKNPTVKKAGEVVIGFGILFLGISTMSSSMGALKELPAIQNLFMSLDNRFFALLLGLVITAIVQSSSVTVSIVLLLAQQGLLPLKICFFIILGCNIGACMSAMLASLSGKKNAKRAALIHLLFNIIGSIIMAVILLIGSNWIEALIMHISGGNLGRCVANTHTIFKVFQVIILMPFMSWIVKLTYFIVPGEDNDVEDEYEMKYIGDGDRLSSATAIPQVCSEISHMGEIAIGNLEKALDALLTKDDKAAKEVFEVEKRIDYMNKEITDYLVKANQISLPVGDRKKLGALFHVVSDIERVGDHAENIAEDVEKLIDMKEDINGMAGNEIRRMQEMTVKILHLSMDMFNLEDDSHLQEILDLENAIDAKERELQNLHVKCLTTGECSAQVGMMFSDLASNLERVADHATNIAFSILEEDPEGDKPPKVELAMNNKEIMDYAEEAIIHTYNRFPVVLDHGDGVYLYDVEGKKYLDFAAGIAVCAFGYNVKEYNDALKAQIDKMIHVSNLYYTQPMAEAAHKLVNACGLKKVFFTNSGTEAIEGAIKLARKYAWTRDNGSTDHEIIAMNHSFHGRSIGALSVTGNPHYQEAFKPLIDKVVFAEYNNLEDVASKITDKTCAIIMETVQGEGGIYPATREFIQGVRKLCDEKDILLILDEIQCGMGRTGKMFAYDYYDVKPDILTVAKALGCGVPIGAFVAGEKVEKALVAGDHGSTYGGNPLATAAANVVFDMFESRHILDNVNEVGAYLGEKLASLVERYDFIKETRGLGLMRGLEFTIPVGDIVAKSIANGLLIISAGTNIIRFVPPLVITKENVDEMYEKLDKILSEVQMEKDMNQYLSKAEVLIEALPYIQRFNRKIIVIKYGGSAMMNDELKKNVIADAVLLKLVGFKPIIVHGGGKEISRWVNKVGMEARFVNGLRVTDAPTMEIAEMVLNKVNKSLVQMVQELGVKAVGISGKDGGLLKVKKKYSNGEDIGFVGEITEVTPKILYDLLEKDFLPIVCPIGMDEDYNTYNINADDAACEIAKAVNAEKLAFLTDIEGVYKDPEDPDTLISELTCEEAHALIEEGFIGGGMLPKLNNCIEAIENGVSRVHILDGRIPHCLLLEIFTNKGIGTAILGSEESRYYHEQMEYIEGGVTAAKGFKASSAAAGIKYQGRTDMSMIYSDVPCVAAGTFTTNIVKAAPVKWDRQVVYESEHAQAVICNSGIANACTGVQGMAYCEATAAKAAEVLGIQKDAVLVASTGVIGMQLKMDRIEAGIDMLAPALDGSIDAGHLAAKAIMTTDTVPKEVAVTFEIGGKKVTMGGMCKGSGMIHPNMCTMLGFITTDANISKALLQEALSEDIKDTYNMVSVDGDTSTNDTVLLLANGQAGNPLIDTKNEDYKAFCEALHAVNACLCRKIAGDGEGASALFEVKIIGAEKKEQAVTLSKSVVTSSLVKTAICGHDANWGRILCAMGYSGAQFDPEKVDLFFESAAGKIQIMKDGVAADYSEEEATKILSEPEVTAIADIKMGNQEATAWGCDLTYDYIKINADYRSMNDIIIRTMTIDDYDRVAALWAGIKGFGIRSIDDSREGIERFLRRNPNTSVVAEMDGKLVGSILCGHDGRQGCLYHVCVDASYRQHGIGRKLVAKAIEALKAEQINKVYLIAFTRNEGGNAFWKKVGWQCQDDRNYYDLNLNEANMTVFNEMIKAGIIGSTGYAGQELVRLLMQHPDVEIVWYGSRSYIDQQYADVFQNMFQIVDAKCMDDNMDALADAADVIFTATPQGLCASLVNEDVLNKVKIIDLSADFRIKDVEVYEKWYGIKHKSPSYIKEAVYGLCEINREDIKGARLIANPGCYTTCSILTCYPLVKEGLIDPNTIIVDAKSGTSGAGRGAKTANLFCEVNENMKAYGVATHRHTPEIEEQLGYAAGYPITINFTPHLVPMNRGILATAYASLKEGVTEEQIRAAYDKYYANEKFVRVLKPGVCPETRWVEGSNYVDVNFKVDPRTHRVIMMGAIDNLVKGAAGQAVQNMNLAFGLDESTGLNLVPMFPMKEKVVLAYSGGLDTTAIIPWLKETFDYEVICCCINVGQGEELNGLEERAKMSGASKLYIEDIVDEFCEDYIVPCVQANAIYENKYLLGTSMARPGIAKKLVEIARKENAVAICHGATGKGNDQIRFELGIKALAPDIKIIAPWRMTDVWKMQSRQDEIDFCKAHGIDLPFSADSSYSRDRNLWHISHEGLELEDPSLEPNYNHVLVLTTPPEKAPDKPEYVTMTFEKGVPTSVNGKEMKVADIIRTLNELGGKHGIGIVDIVENRVVGMKSRGVYETPGGTILMEAHQQLEELVLDRATAEVKKEMGNKLAQVCYEGKWFTPLREAIQAFVESTQEYVTGEVKFKLYKGNIIKAGTTSPYSLYSESLASFTTGDLYDHHDADGFITLFGLPLKVRAMKMAEVANKNADKMSKDKTKRNTAYFHLPGLFEFYELYRIFLSVFHEHREYFYDWCEIGSIYGAPSDCIWGGGRVEYETCDPSDALALMQKYGISARLTFSNSLLRKEHLSDKRCNTLCALFSESSRVQNGVIIHSEMLLDYLKENYPKLYFISSTTKVLTDFEVFRHEVERDDFRYVVPDFRLNKQMDQLDTLTQIQKDKVEFLCNECCWFGCKDRRNCYEAVSRRNLGVNAPEHHCKAPASEQGYRFSKAMMNPGFIGIDDIRNIYIPMGFSNFKVEGRGLGSALVLEFLLYYMTKPEYQLNVREAIYLDNMLDLFMRKSFYPKMAWSGICHNRKLYIPYFFTCIAMVMMFYIIDALSVSNVLVRIRGGETMQGMLNLGKWIIGLFTLIFLFYTNSFLNKRRSREYGLYNVLGMDKRNLAHIHFWETAIIAGISLAAGLIFGIVFSKLAELWMVNILNGQTDFKLRIEGSAIRETILVFLVIFILILLSALRKMTMAGPMELLRSEHTGEKPPKGNWLLALVGVVVLAIAYGLAVTIEDPIVALTWFFAAVILVIVATYMLFIAGSVTLCRILQKNKGFYYRKQHFISIASMSYRMKRNGAGLASICVLSTMVLVMLSSTICLYAGVENIMRERYPRDLSYEVHVSAPKYLNEESEANWRQLMEETLHESHLTASDVLEYTSAFFYGKLEGHNFRMKDELMDMETNESTAFNVDEVYVAPLSVYNRVTGEKETLDAGEALVAVYGDSYENNTDILSIHNDIQLNVKKVISNFKAIHMDGSVSTKVYYIFVPDFDEVAEKLAQYNLAQYMTENMENVYFKCYYGCNLDGSDDAQMAAEGVLNNKFAALNASQQEGIDYVSYESYAFNKESFYGTFGGLLVLGILLGIVFVFAAILIMYYKQVTEGYEDQSGFVVMQKVGMTKKDIRQSINSQILIVFFAPLLLAGLHLLFAFPMISKLLLLFGLNRTQFLAMVALGCYLMFAVFYIIVYKMTSGVYYRIVSVNNKMSLTRGTLYTTRFGGNQVQALKNVSFSVEEGEYVAIMGESGSGKTTLLNILAALDKPTGGTVLLDGRNLADIRESAMAEFRRDNLGFVFQDFNLLDTFSLEDNIYLPLVLAGKNYREMHKRLEPIAKQLGITQLLKKYPYEVSGGQKQRAAVARALITHPKLILADEPTGALDSKSSDELLDLFSAINQDKQTIVMVTHSVKAASHAGRVLFIKDGEVFHQIYKGHHTRQELYQKISDTLTLLTTGGDRAMLMNTFMKYASKEYVYMPPTCSCATTAAPAAAAGVAFLHGLTPQQINDMLCTAQVQMAGVVCDGAKPSCATRMYVALFGSLQAMMMAKEGIRATNVEGFVHNDLKVTLENLYRLQHDVLHNKVDAILWDIVKEQKVIHMGEISGETIFIDGTKIEASANKYTFVWKKAVTKNQAKLLQKLADFVAECELLYDIKIVYGNTIKIKHVKKLRKKLYALKETENIVFVHGIGKRKTPLQKSIETLESYLNRLKKYNQQIHICAGRNSYSKTDHDATFMRMKEDAMGNGQLKPAYNLQHGVDSEYITWLTIGPQPTDTTTLIPFLKDAQEHLKFKYKNITADAGYESEENYLFLEANGQLSYIKPANYEISKTRKYKNDIGKIENMEYDVKKDIYTCRNGKKLGVDHIRHSKSKTGYVSEKTIYKCEDCNGCPYKSECIKGNNCKTHLEERTKTLQVAKTFLKHRKEGLDRILSEEGILFRTNRSIQAEGSFGNLKQDMQFRRYLSKGNANVFAESTLLAMASNINKLHNKIQNGRTGTHLFPIKSAMDACVIEACKPFYPPQLIIQDELHLISGPLGTIYGGYETIIEDMCCLEKNGKKIHPKYVVSTATIKNAGEQIKCLYARENYAQFLPSGFDTRDAYFIREIPLVSKDLEDLTEDDITELLEKGEKPFRQYAGICASGQSVKTTLIRLYSVLLQEAFILSEDPKYQDYVDPYYTLVGYFNSIRELGGAVRLLDDDINSRLKVLRKKYKNARQRFLGFDGKKEITSRIPSYQIAEILEKLAEPFDPSKERQSCGRCAEICPKQCIEKRGSLMIFKKIRKGHADWRNFLCSTPARDYVFQKDAYEDQIDRAAKNIRNTDCVIIGAGAGASTAAGIQYGGKRFTDNFAEFIKKYGEYYMTDMYAAGFYPYPSEEAKWGYWSKHALMNRFDPPALPLYTELYDIVKNKEYFVLTTNVDHQFYKAGFDEKRIFATQGDYGKIQCQKACHPKTYDAKDLFRKMDKARRDCLIPSELVPKCPVCGGNMAMNLRCDNYFVEDEAWHEAADRYAGFLEQNKDKKVVLLELGVGFNTPIIIRFPFEKMVRENSSYSLIRMNMDEAVVPESFGKRAIGIGGDMAKAITDIRGAGIMTQDERREYLIQYLLKEKIPFGRQNIPTDKQGQENLLRSLMNVRPPRPISNDFLKIQDEYLTERNIERGITDIDTLAPVKSDSRLYIWQGDITTLKCDAIVNACNSQMLGCFSPMHACIDNFIHTYAGMELRLKMHEIMAKQGHEEETGKAKITSGYNLPTKYILHTVGPIIQWKVTKEDEDLLASCYTECLKLAADTGVESIAFCCLSTGVFRFPQQRAAEIATNTVKQYLNKDSRIKKVIFNVFKDEDLKIYSGLLMGNITLEIKRDAYLQQLIERKDNGMIKVITGIRRCGKSFLLFTIFKRYLLENGVDVDHIIEIALDGIENEELRDPKVCFKYIKDAMKDDGKYYLLLDEVQFMPRFEEVLNSLLRMSNIDVYVTMTEFRGRGDEIRIYPLSFAEFYSVYDGDYDDAWDDYMIYGGLPQIVSFQSERQKADYLKNIFANVYLKDVIERNKIQNVDEIGILVDVLASAIGAPTNPSKIANTFASERQMTYANKTISKHIDHLTDAFLISKASRYDIKGRKYIGANLKYYFTDLGLRNARLNFRQQEPTHIMENIVYNELLIRGYNVDVGVVDIFGKDKEGKRVRKQLEVDFVVNQGNQRYYIQVAYDMTSEEKQTQEFNSLRNIPDSFKKIVIVNGSKKPWRNDEGFVIMGMKYFLLNANSLEFMLEQPWLSLFFYPYKRDCSADYVEQTEYDSDSENIREMQTYIHGNFPVFEGFNHMQYQIRDPEGFARMLETIIETGRLPNPVVKKQSKITSSFEGMRKSDWAKWLIVIPAMLGIVLVTYVDRITDIWGFGAFICQLIAILELAYGMRIAMLAQSRKKSYRLTPEERHEYAQYLYEKQYQRYPAVANQMLLVMARMSILLDNYERATQELEDICIDKFNPAQLKVYYYLKVVTAVVAGDTEGLQESQMRYAGIPDTKCVYPLETELAEWIEQRDTVQMAEALKKAVPDKKEHPVRISIITLILAYSTFFYGLWYGINRDMGYEVRYRFAEISIAVITISLAILLIWGIVSLYRHNCQALSIQPGKNRVALIIIFGAAAIFTLLIIGMSGLSVVFGMDGEETVTGHDSKYTYITVQEDYGGERRYRTNNPFVMQSMDGLWWSSDSSDIMDAEEDNEESSDADTEDFPVTEDTQNGDVVEDYEAEGQHDGLTIQNAMLAVYNYLQENNALQNMAFSYTANAKGEVYGIVSETQETKDGNTVNVRYCLYDNGAKTDADGNSCEELVLEKVYPDGNYETELVDFYLVNTDTMQVTDEQKNTWMTMGGYVGQAYAQLYPDRLAGFISIDSAPLQRNYVTAVEICLLKRMEPVYAHYPWELLLKSETEGVATSDYGRNLMKEMMLVYDGDQHRYAQIAGHGFRILAEAMEKDLPYEIKCPSLLICGTKDHAGSCIRYNREWHRKTKIPLKWIEGAGHNSNTDKPEMINSLIEEFLSNIMRFYNIFFSPTGGTEKVADIVAKGTKLDAEEIDLIKEPDKLMKVKFEKKDLCLVAVPSYGGRIPSVVTDMFRKVKADGTKAIIVAVFGNRMIDDTLLELQDVLEASGFVCIAGMEAVAEHSLMHQFGTGRPDQQDEKELLEFAAKIMQNSEAQRTPAFPGNRPYREYGGVPLKPVANGKCTSCGLCAKECPAGAIPLDNPKMTDKDKCISCMHCVSVCPKKARNYSKLVSFIAGLKMKKVCSGRKENKLYLMKLLFKQRLFSWFDSYDIYDEAGNTVYVVKGQLSWGHKLVIYDAYGNEVGMVVQKVLTFLPKFEIYKNGSYIGCLSKEFSFLTPHYNIDYNGWHIDGTIMEWDYSILDRSGYSIARVSKELFHMTDTYVIDVQDPGNALDALMFVLAIDAEKCSRNMGLFKKKIVKKTYDREHMKPVIRASICTGEEVEKEYMMKITYINHSGFLIETKDCYYIFDYYKGELPLLDKKKEVIVFCSHFHEDHFNPVIFEILDDMSMTYQAILAKDIRKRKHLSDMKITYVYHDQTYNLDNGTQVDTLLSNDSGVAFIVKTKEGTIYHAGDLNDWYWDGEPKADNQRLTSAYRAEIRKIKGMHFDAAFVPLDPRQGNHYADGILYFLKNVDCNVIFPMHYWNDANVIKRFITEYPQYKSRIKNTECAKGEELMKFKMIHENYNVSDLDRSIKFYNEALDLHEVRRKTTDDFIIVYLSNDVSDFELELTWLKDHPQPYNLGECEFHLAFQAEDYEAAHKKHEEMGCICFENEAMGIYFIVDPDGYWLEILPMIGPNVTLATPMHPLLPEERNIRMREDGSFYNLEYAKPITIKDNCWLASNVVVCGGVTIGEGCVIGAGSVVTKDIPPYSLAVGNPCRVIRKITEKDHMPDGIEKNMKYSTKLSDTIHILIFIALGDDEQLSSTKIAESIKTNPAYVRQLMATLKNAGIVVNTQGHANAALAKSADKINMYDIYRAVEGDKPLLHLDTDTNPDCGIGINIQFAIGDFYHEIQNMIDEKMKSITLQDIIDRYYFKIGKVKNLMNGTDKNVVLLELGVGEMTPSIIKLPFWEMTYKNEKVFYACLNQKKSSAPEHIKDKGIYIAGDLVETLRDLKENITGKEMMKMNVYQEISQIIKEADGILIGASNGLSIAEGYNIFADDAWFQENMGDFREKYGLRCVLHGFSVPMNVEEKWAFVSRLVKAKAMQDEPSEIMKNIYALVKDKEYFVVTSNAEDHFVPAGFEVDRVFEMEGKLTQMRCKNRCHDEVYPNQKAVLAMTEEEVNGRVPKELLPKCPKCGGDMEVNWGEMSSFTETKNWKEKAARYQEFIQNLHGKKLVILEFGIGWRNQMIKAPLMQLAAVEPQARYITFNKGEIYIPEEIKEKSIGVDGNLTEELKEIRKGRIDMSCYENLVMKTQMNYSRHYSTYASGGTAVVLSKQKPLSYEEQIQEFVRRVQEAECIIVGGASGLSAAGGGDFYYGDTPSFREHFGKFADKYGFKGAFSGMMHRFSTRNEHWGYVATFLSTTQNAPIREPYLDLDRILQGKDFHILTTNQDTQFVKIYPEEKVSEIQGDHRFFQCSQCCQDETWDAVQPVADMIAAMGEGTMVPDELIPRCPHCGAEMFPWVRGYGNFLQGKKYEEEYEKISKYIQKNKDRKILLIELGVGRMTPMFIQEPFWELTNSLKDAYYISVNSEYQFLPEFIEDKGIAILGDIGTVLKDLRKAKEEGAFVMALTPYYYYTSSIYKGECTSSRVGLMTAKNSDTPLYLVKINGEQVYELVKKYLTEADENFYVTTKYELPIASGMKIIVKNEENGFSLKDITINDKKIDTEKEYSILLTDTTKSILKKINPKCAIEQIGDTTLSSAWIAAMSNGQQPSAPEDYIEVEKMSLFVIIFILSSFVFVKFLLNRMNTYIEVNGEISMESVVEQIQQTYDMQVSGYYRQLHFVEDYLCKEKKISLEADNNRNFFKAWEKESESTLLFLQENGKAITSDGTKLKVDMPSKLLLNLRNGFNIEKLVAFEFEQVKKDGYLVAIPCQEYTINGETYTAIGTVYDHSKLDSMLNLGGYDGSAYLFMLDDDGNITYTNQKDDIFFRNYSLLKHLKSNHAITEKEFDSLNKKIAEGKKGVELLKKDKPYYLGYCPIESNNTMLIYIVKKRQMLKEYQKTIGFITMIMTGFILLLFAGLFYSISRFSIANQKVKFEKRNNELQAMIISEMEEANKNLKKAKNIAIEALQTAENANKAKTDFLSNMSHDIRTPMNAIIGIISLIRHNAGDKEKVIEYADKIAISSQHLLGIINDVLDMSKIEAGKTVFKYSDFSILDFIEELNTIFHSQANEKNQSFIIKKENLKHEWVNGDKVHLMQIFSNLLSNAIKYTQEGGIIQFIAEESETNSSTYGKYHFIVSDNGMGMSADFKETIFDAFTRAESSVTNKIQGTGLGMAITKNLVESMGGTIEVESEPNRGSRFEVILNLKIVENRVVSSTEQIEMHETDSDILDGMRFLCAEDNELNAEILMELLKFEGAECTICENGKRILEAFEQSVPGEYDMILMDVQMPVMNGYEATEAIRRSSHEQAKTIPIIAMTANAFSEDMQHSLAAGMNAHISKPVDMKLLKKTIRNIKLGREEAKFIDQMPGENIRRKRRLSSFQIIILGFAGVILLGALLLMLPISTTAGGVTPFNETLFTATSAVCVTGLVVQDTGSYWSAFGQAVILTLIQIGGLGVVTVAASLALLSGRKISLMQRSTMQDAISAPQVGGIVRLTRFILRGTFLIELLGALAMLPVFCRDYGWRGIWMALFHSISAFCNAGFDILGTEDNLYPSLTGYAGSPVINITIMLLIVIGGIGFLTWNDICENKWRFHRYRMQSKVILVTTGLLILLPAVFFFFSDFSALPAGNRLLASFFQSVTPRTAGFNTVNLSAMSSASQGVMILLMLIGGSPGSTAGGVKTTTLAVLLANAVATFRQRDSAQFFGRRVDCSAVKTAATILMMYLVLFFGGAVFISAYENLSLSTCLYETASAVGTVGLTLGITPQLHITSQMVLITLMYLGRVGGLTLIYAAFSGKKATGAKMPKEKIMIGMKNILLIGAGRFGRHIAAQLFQLGHQVMAVDTNEERINDVLPYVTNAQIGDSTNAEFLHSLGIGNFDVCLVTIGGSFQNSLETTSLLKELGAKCVVSRAERDVQAKFLLRNGADHIVYPEKQVAKWAAIRYSSNHIFDYVEIDDQHAIFEVEIPEGWIGKSVGELDIRRKYGINILGIKRSGKTDVSITPDTVLSGETTILALGEYKTLQKCFRIMSKEHILVCLSSSPSNERIVRMAEKMAQAFCGSLTALYVQTPGDADMNAEDTVRLQANMRLAQQLGAEIVTTHGEDVPTQIAEYARLSDVTKIVIGRSGVKRRHFWSEPMLTERLIALAPEVDIHIIPDAEVYKSYRRNRLIAICPALPTAWELLLTVGILAVATIIGWVFLRLGFADANIIMVYLLGVLLTSAFTSGYTCGVLSAFLSVILFNYFLTEPRLSLVAYGSKYPITFAVMFAAALLTGTLAAKLKVHAQLSARDAYRTKLFFDMNRQLQKAETPEEVYRMTAMQIQKLMQRDVLICPAQGGALLDEIIYPVDGRSPYSISDADGEQNVIQWVWQNRKRAGATTHNFPKAKWLYLAIRTGQQVFGVVGILMDKQTQPDAFTSSVLFSILGECALALESLHNAAEKEKAAVLAKNEQLRANLLRSISHDLRTPLTSISGNADTLLHSYNALDEQTRKQIFTDIYDDAQWLTGLVENLLSITKISDGSVKLRLSDQVVDDIVSEALRHIDRRSTEHHIEVDCGDVPLLVRVDAGLIVQVLINLVNNAVKYTPTGSNIRITAIPRENMAEICVSDNGPGISDELKERVFEMFFTGSNPIGDSRRSLGLGLTLCQTIIHAHNGEMTLKDNSPHGCIFSFTVPLSEVNLNEMNKPLVLVVEDDTPVRNLITTTLKTHEYRYLSAQNGASAVLEALSHNPDIVLLDLGLPDMDGVEIIRKIRSWSNMPIIVISARTEDSDKIGALDAGADDYLTKPFSVDELLARLRVTQRRLALMKADTAQETPIFTNGALKIDYAAGCSYIDGAELHLTPIEYKLLCLLSKNVGKVLTHTYITQQIWGSSWENDIASLRVFMATLRKKLENGKDGQQYIQTHIGIGYRMLRVEMKKKTLVPLIIFLLGVCLVGLIVYITDTHEKEQRHITAQLNVATYGERIKNEITNGIEITDTLEQILISENGEIHQFETIAGNLMSDSIECIQLAPNGVVTDIYPADGNEAGKIDLIHDKDRGKISCYARDNHTIITQGPFELKQGSYGIAVRNPVYLKDKTEQEYFWGFTIVILRVPDIFSDSFLALSNFGYDYKILKTDAPWSDTYKVVYQSDGETNHPVSYTFTIGDEKWKFEITPKSGWRNKSLLIIIIGLFLTISLLLSILTRVWLVAKELKNKYQIMAHTDSLTGIYNRYGFDELAEKMISKNPQTHFVAALLDIDDFKFINDIYGHSYGDRALKSLADSMKAFFPSDALLGRNGGDEFCILLPNCTFAEADVQLQQFTKLSKTFSYQGKEHAFYISLGYAEYPTFASDRSQLMRCADAALYEIKLHGKNGCMAYREGLRSGVRKQLGFAFKDISEHLPGAFIIYKADKEDDELFYANDEFFHMAGYKDIDELFKFTKKSFRNLIREDEQQQIESSIWEQIDNGNENDYIHFHLRKADGSYLSVLDHGLGRYAYSLQMRKKRWMSIMLVLCMILTLLPINTAYADEADTQKDANQVEEVQSDEDIVMQTEQVEEVKPDESVAMQAEQVEEVEPDESVAMQDEQVEEAKPDESVAMQDEQVEEAESDEDAVMEETVKPAVRMLAPAAVSPAASPEKIKEIELNLKPVTEITNINDFKSITYSPSDKIHLEEVTVYNGYNSTSGSIASVYTPDKGYTVVYEFTCDKNAYELRPSYSKVKINSKYIQNWDWECKFSWGSTLKVYVFYPSLKNKVGVTFKPRDQWSGNISSMYVGHDLGDAYSVVLDYYSGLNQISNDIGSDTAYDSTKDYSVRITIAGKRHAATISPDLTKDDVTINYGTIWKITRDDTTGYTRIYVNFPKEDSNTEYTVKAKNAEIMNEAGEPVSKAKAGTVLTVKLKDLEKGYAFEKWAVDDNSTDVEFQNVKSTTTTFVMPKGEVYISPATLRIANVYSKKLTYNGEEQTGVYLHDVYGGGSSIGTLTGHKATEAGTYTARASLNKGYIWSDGTTEDKNIVWTIDKADRDGPRGLRSYMPTKEGANDGGILATTTEMEYRKVGTTTWKDCPDKEVTGLSTGDYEVRYKDTKSYNRSIAIIYTVPIWGPKTWITWIENGTPDGIQLPKNATITITANPPEKGKEFDKWVPNASSNVKFEDEKSEVTKMTVLGGNVTVRATYKDKETPGALKYDLNVINGQGTGKYAINKTVEITANPAPEGKEFDKWVVVEDTVAVADITKPKTTLTTKGVDAWVVATYKDIGSVAVDHTLTVVNGSIYSSSNPGKFKRNEAVTLYSKEIKNFDKWVVTSGSVVAILPNENTLNVTIITSDEDTTIEATRKSDASVHTHTYGVWSNDDADHWHECTDAACTDKAGSVKDKAGHVYDDDADTTCNVCGYVRTVTPPAPVHTHTYGAWSNDDTDHWHECTDASCTDRAGSIKDKAGHVYDDAADTTCNVCGYVRTVTPPAPVHTHTYGAWSNDDTDHWHECTDASCTDKAGSVKDKAAHVYDDDVDTTCNVCGYIRTVTPPTITPDYKFLEGANGKWTKSSDKNLAFRANGEFSKFTGVKVDGTKIDADKYTAVSGSTIVNLKKEYLETLSVGKHTLTVVYTDGECSTEFEIKAASTAKKDTTDKENKSSKTTAAKLDNAKTPKTGDNSNILLWFTLLFSSGVVLMGKAFANKKRKQDRMPYFVLNIRRVDYVPPKSPGCRPGIPDFFYILMFAILGWFTYMQFFGADERRLNVNSDSMIYTGTFTWEKSDGTSEEITVPGRYDLPVGETMVLTTRLPEDYHENTMAIRSSLQDVKFYINGTLRASYNTSETRLAGKNSASRYIFCETSEADAGKELRIELTTHTYNYSGVVNTVLCGDKTDIWLTILNQYGPATYIAIFIFFTGLVTILFSLALGMIYHSSFDMEYLGWCMIMGGVWMMGESKLRQILVPNASALGSLCFVMILLCPIPILLYADSIQKQLHRRLYTILGGLALLDFAVCSILTFFGIADYIETLPIGQIILCSILVVVFIHLFIYMHSSRRKSDRLLLLGLLAAIICISIEAISVYFVTSISGLFIGIGMIILLFVNIIRTLRNLQDMELHRQKIEVEKSKQQTERISLQMMQTLATTIEAKDEYTRGHSYRVAEYAALIAKELGWSQDEIINLKHAAHLHDIGKIGIPDSVLNKPTQLTEDEDNLLKKHTIIGAEILKDVTLIPHVVEVTRNHHEHYDGSGYPDGLAGTEIPIYARIIAVADCYDAMNSRRIYRNALSQDEIYEEILKNKGTQFDPEIADIFLTLLTENQIPDLDDFSESSSTSNLADDHRTISKFISDVVITIKAQEYAKNYDLLTTLPMRNLGERLTAELMQQSDGYLIFLDMDNLKKINDIHGHKAGDRALKLLGSLLSRYSDEGVACRLGGDEFLLFLPEATHDSVTTQMQELFDQFRLAISKDVEIRSATLSAGICMCTAGDNFENCYQKADKALYYVKQNGKNQFFFYQQIDRKELLTSSTGKDLQLVAKSLRESGTYIGAMDLNYRDFARQYEYMSQLSIRSQCHCYLVMVTMETAVDTIPNIEAIEQALECIEKAIRQKIRRVDICTRYSSMQYLIILFEPTETEIPHIMDRIFMQYCQQCDNTDFRPTYEYLAIAGEKQMGRQSTRANKNIYQICREECELTREKASEMMTGVSASRIEKIEYNLQDPTPYDIVQMADCYKRPDLCNYYCSHKCEIGYRYVPEIEMSELSSIILETIASLDEINPLTGRLIQIARDGKITDDEIKDFAFISHKLDKVSVAIDALNLWVNKTASENNINIDMLNIEKEKLDKMLTLLFIICFFAVFGKLLMFGIKAAWGISKFLLTIVLLPVILIGLVVGGLIYLAFPILIVVGIVGLLLMAEVKDKQKLARPVLLRPHHGMCLAYFKGEGYSDGFSAHMKEVLDELQKGMDVQLYVGTDEICSACPNNREGQCTDLTLVEKYDNAVLEACGLADGEQLAFDDFTEKVQNQLLVTGKRKEICGGCKWNGICENEKSRWEEMTAGRTVLYSNVTTEKEFKTIEYKHTLTARNIRAGIVNWKLSGRMLKVAVYGKGGIGKSTITSNLAAAFAAMGKKVIQIGCDPKADSTINLLGGEPLRPVMNFMREEDEEPERLEDISKEGFGGVLCIETGGPTPGLGCAGRGIIATFQLLEDLKLFETYKPDVVLYDVLGDVVCGGFAAPIREGYAEKVLIVTSGEKMALYAANNISSAVRNFEDRSYARIFGIVLNHRNVENETEKVQAFAEKSHIPIVGEIPRSDEIIRYEDQGKTVIEGNRDSEISQRFFDLANLLLEDEAKKAQDGEMMQDAFFCTVGELAAMGRENIPPQFISGAHLIYSSPATLAFNSPGAEGFGVKRAGLAIPDSIMLIVAPGCCGRNTSLISSMREYDQRFFYLMMDETDIVTGRHLKKIPKAVKEICDSLEKKPSVVMICITCVDALLGTDMERVCRKAEEAAGLPVRPCYMYALTREGRKPPMVHVRQSLYSLLEPRKKKGNVVNLLGFFSPLVDDCELYDLLHQAGVKTIHEISACRDYEEYQTMSEANFNLVLHPEARFAAEDFHDRLKIPFIELTRLYQIDKIGSQYRAFGKVLGVTFDDQAAAESAQKAVDAFRVQYPEASFAVGECMNGDAFELSLALVRYGFKVPEIYGTITAENFIYIKQLAAISPETRVYSNMEPTMLYYDGENSGVNMAIGKDAAYYHQNCPNVMWNQDRQPYGYAGVRRLFEALTEAENRWEEQPMKGLRKYLTPFAPDQSGAVSVLYELGGILVICDAGGCVGNVCGFDEPRWFSRKSAIFSAGLRDMDAILGRDDRLVAKLTSAVEKLDVSFAAIIGTPVPAVIGTDYKALGRMTEKKTGLPVLTIDTNGMDLYDRGQEKAWLALFKKFVVDEMPVEKGRVGIIGATPQDLSDLSAGDQLRQIFAADGKKAVCYGMGDGLDAVKQAASAEYNLVVSPSALETAKYLQKQFGTPYVVGYPLVKTMLPEADYTGKKVLIVHQQVMANALREELKMRGASEVKVCSWFDLKPELREEDDVYLKEEDDFTELAADSKWDVVIADDCMKSMLPKFGGQFIGIRHFAVSGKLGGACMNQTETRKIRVYGIVQGVGFRPTVSRHAVKNDIHGSVCNKGPYVEIFAQGTKAQVDGFLEDLEKRPPKRAAILKINVEHLDNNPEFDGFEIIESEKTKGEIFVSPDIAICDECKEELYDPNNRRYLHPFINCTCCGPRLTILDALPYDRERTSMKEFPMCSECAEEYNNPESRRFDAQPVCCNDCGPEVYLIGRDERGREAITYTRKVIASGGIAAIKGIGGFHLCCDATNETAVARLRELKRRPMKPFAIMARDMSAVRKECQVTEVQEEVLDGHQKPILLLERLDKADSQICPSVAPGNPKIGVMLPYAPVQLLIFDYDDGIQMPDYLVMTSGNTSGAPICRDDNDAIAELSHLCDCMLSHNRKIRIRADDSVMDYYKDEPYMIRRSRGYAPLPVMVSAPWKGQVLAVGGELKNSFCIGVDGRFYLSPYVGDLEDLRTVNALRETIGRLETLLEVEPPVVVSDMHPRYNSTMIAEESGLPVIKVQHHYAHILSCMAENDCQEPVIGVSFDGTGYGMDGTIWGGEILLADYKAFQRFGCITPFLQIGGDASSREGWRVAVSMLYGQMKDRAAAMTMIEKLNLCSVQDAKVQMAMADRKINAVMSTSAGRLFDGVSAILGIRKASTFEGEASMALEFTAEAYEKKHQNAVDLQHAMDEMRKQIPLAVCIDNKESESTEKNKPEQVKAVLNTDALVKTIAEARLAGADTEKLAYFFHWILAEEIIVACQKARKESGRGTVALSGGVFQNQLLLKMVDEGLQKEGFKVLRHRLVPPNDGGIALGQAVYAMGALKSMCVGLSAKVVKINDGVAIIDAGGAKREISSQLIEDLEPGDYVMVHAGVAIAKITDEDDSETDQVLEDLFMSEEKKKTAREIIEGYDGPPVRIMEVCGTHTHEIFRLGIRKLLPKQVELISGPGCPVCVTQVGFIDEAVYLALECGVTICTFGDLVRVPGTEMSLAGAREEGAKVRIVYSPVDAEQYAKDHPEEQVVFLAVGFETTTPASCLAVRKASEDGLTNFALLVANKTMPGAYAALKGSADVFLYPGHVNAITGTELCESLVDEGVSGVVAGFTAKELLTALAVALVKFQEGKPFFVNAYPRVVTWEGSREAQKLVADMMENCDTEWRGLGIIPNSGLRLKKEWEAYDARKKFHVPEMKGRSNPACRCGDVLQGKCKPSDCKVFGKGCTPQHPIGACMVSNEGACSAYYQYSMNNKTVTMAHGAGGKQTSELIDEVFKAHFSNPDLTADDAAVLPAPKGKIAMSTDGFIVSPAFFPGGNIGKLSICGTVNDLACMGAKPLYLSCAFVIEEGFPMEKLEEIAGAMEKTAKEAGVRIVSGDTKVAGKGQVDGVFITTTGVGEILDGVSTSGDYAKPGDAIIVTGDIGRHGCTILLAREDFGIDADVTSDCAPLWPTVESVLNATKDVHVIRDATRGGVGTVLYEIAGQSKVGIRLNAADVPVAPEVKGVCGMLGLEPLYLACEGRLVIMAPKSKAEKIVEVLRQCPYSKDAAIIGEVTEEQPGHVVMTTEIGTQALLPQPGGELLPRICMEKKMETRVAVIAIIIEDGSSAQEVNELLHGAAQYIIGRMGIPYRDKGISIISIAIDAPQDVISTLSGKIGRLKGVSVKTAYSNVVSKENMIKIAVYGKGGIGKSTTVSNVAAALAEKGLKVMQIGCDPKADSTMQLRHGEAIPTVLELVNQRKNDFELEDMVRIGFGGVVCVEAGGPTPGMGCAGRGIITALEKLKEKGAYEVYQPDVVLYDVLGDVVCGGFTMPMRKGYADKVFIVTSGENMSIHAAANIAMAIDNFKNRGYASLGGLILNRRNVKREDEKVAELADDFKTSVVGTLSRSEQVLLAEEKQQILLEAFPDSEMADEYRKLAEQILAVCEARGMLKRLGGTVDPKGAATAIKDAEFPVPFASELEFNSPVHGTWNIVHTGMQVPDAHQIYVCADNCMRGVVLTAAEMNEAERFSFVILKEEHLLNGNLEDITIEGVADVIERLEQKPKAVFLFTVCLHHFLGSDLERIYDELGKRFPEICFVRCFMDPIMRKSGLTPDQKLRLSMYDPLKKGTVTEEGQRRISILGSDFALDETSDLKRLLRCNDYQIKESPVCESWEDYLSLSDCRMMLNCYPSGKAGTEWAAERLGRPFMYLPSCFDYDEIIGQLEALSESMELLGVLDYEGEKESCEAALHEALLEVGDWPIAIDGTFHPRPMGLARLLISHGFYVERIYLDAISPEEENDFKWLQQHAPELMLLATVQVKMRVLPRKTEREMLALGQKAAWFTGSRHFVNMVQGAGLYGFDGIRRLAHLMVEAAREEKETPDLVIRKGWGCESCIMRQAYRIIPIYTADVSGVCSALYELGGMTVMHDPSGCNSTYNTHDEIRWYEEDSLIFISGLTEIDAIMGNDEKFIHDIEEAARDLKPRFIALASSPIPYMNGTDFPAIAEVTEQDTGIPTFAVPTNGMHDYVRGAGMALEAIAEHFVLPKSHAEDVSNKNTEEKGRNRLVNLLGVTPLDFGPLDHAETMKRSLEQYGWQINSMWAMGDSLDQLSKSADAAVNVVVSSVGLRAAKVLQRKFGTPYVVGTPVGRFTEKLSEAMEAAVSGEKEDNVVYAACRMSAENLQDVNDAKESPSHRVEMTLIGEPVTMGSLAAAIELQYGRSVRVLCPLEETEGLLTPGDEAVCGEEMMEQKLKDAGIIAADPLYRPICPKDAQFFELPHIAFSGRIYLKKIKQMPGFADLIMGLNETPSGERVHIGFFGRRNAGKSSLVNAVTGQELAVVSDTRGTTTDPVSKAMELLPIGPVVIIDTPGFDDEGALGELRVRKTRQILNKSDVAVLVADCTEGLKDCDRELIEIFRQKEIPWLLVWNKCDLKPEHPEAKENEIYVSATEKIEIEALKEKIAAIGKTEENKLMLVGDLMHPGDMAVLVIPIDKAAPKGRLILPQQQVIRDILEAEGAAVCVKEYELRETLEKFKEPPAIVITDSQVFAKVSADVPESIPLTSFSILMARHKGLLDTAVRGIAAVEDLKDGDTVLIAEGCTHHRQCDDIGSVKIPRWLKNYTGKKLNIELCSGREFPEDLSKYALIIHCGGCMLNEREVRYRMKCAVDQDVPITNYGIAIAYMQGILKRSVSMFPYLAEELPDMAEYRRFISYMYLYENGRKTINSGFVRVESRNGQCRLSIHMSGIYHSEAKKYQIYMLIRVSGDYIGIAIGDLLVQKQTGDMELTMDSDHLMGTTYDLDRVAGMVLLGEDGSVYGTRWDDEPLETEKFVNREPLSEILVRFGEKNSDAATDETDMERTFADAEPESVITQGTEPEAENLVSPHADENPLISEEEVAAFVDDARMEAFEKNENPENNEILAVSKEPEMSKEQAEEQAEQELYSRSNVYDLLMSQLPQMYPFDDDSVAACVRMELQDIGRMPMPCWIYGSNSFLLHGYYCYRHLILAKVEQKKDKEDVGGRGENDGASEDEGVYLMGVPGIWQHREQYMAAMFGFRKFKPVSRENQGSGAFGYWCVELKLMATATGIKCSLKQNNFQKEVNKRPDARLSANSLFRNVSEESIARILVCSGAKFRTYKKDETIFRQGEQADYFYALLKGNVSIISYMPSGKVNALYHVASGALIGEHYSSNLDTNGRVYWYEAVACEPVEVLAVPWQYLYGFCDKACDHHKQLIQNLYESMSTKEWMAVRKLNVLGFASVQERAAAWLLQETDASDTVVLKTNREEQADYLCVARPSLSRTLMQMQKAGLIEADRKQIRILDREKLEKILMSMNFVNEPTRAWDPKNRLREMINEGSDAANVDKLVELLIMDGFDFSLTADAMTPIDEAERVVSVGMGIAVKSEMYLIENLAQAAGAAMGCSRPAYERLKVLPRERFVGMSGEKFTGTLYIACAISGAQQHLKGIEKAHTVVAINRNEKAPIFRHADYGIVGDIRTILPLLTEKLNSDLPKPDPNAKPAKREMPLYSKTTATADGRYVCMGCGYEYDPEKGDPEAGIEPGTSFEALPEDWICPECGVSKSEMISAVTRGMNGVRKVTEDLYWVGVNDKRIELFENIHPIPEGVSYNAYLLLDEKTVLFDTVDWSGCRVFLENIAAVLDGRKLDYLVVNHMEPDHAASLEEVLIRYPECKVISNEKAFMFMRQFGFDVDGREDTVKEGDTRCFGRHTVTFLMAQMVHWPEAMVTFDTTNGVLFSADAFGSFGSLDGRLFDDEVNFDRDWIDNARRYFTNIVGKYGPFVQQLLAKAKTAPIKMFCPLHGPVWRTNLGYYLDKHDKWSRYIPEENGVMIVYASMYGNTESAAQALAAQLCEKGVTNVRVYDVSKTHVSYLVAEAFKYSHIVLASVTYNLNIYPVMEDFLHHLKVLNLSKRVFGIIENGSWAIKSGSLMEQYIDENLKDCKILNARMTINSSANRSNASELDALSDAIVKSVAIEEKAFEQRVIDDAAFAEEEARKAAFKKLSAKERMALMREKHRQEKGEAMAEDYKVFVVNSGSTSTKVALFVGKKKSSNCIQRVEYLLMMNEHEYYCFLKEFWKVTNDGFIIVDPNGVIVDINETYCEFLGKTREQVLGKPIGEVISTTSMYDVLSSARDGDDNVYLQPYGENDNASNVETHAVANRFCFFNEQGELLGAAAQMSFKERAAAMAYSIATEELNYYKRAYEESSEEDSGFSKILGNSEAMQKLKEKAMRVARKDFPVLITGETGTGKELFAQAIHRESSRRKKPIISINCASIPSELLESELFGYDEGAFTGAKKGGKIGKFQLADGGTIFLDEIGDLPLVLQAKLLRVLQEHEIEKVGGGKPIPIDVRFISATRQNLAEMVERGEFREDLYYRLNVVNIETLPLREHPTDILLYANHVLNALNAKYKTGHLLSDRVKYLLMCYKWPGNVRELINVITSAYATCDSYVIEEMDLPGRLVSGTAGNSVSQMKLSEMMNLHEAAIIRDALRRNNQNCKKTAEELGIDRSLLYRKMRKAGIAIHREIKMDKKIKLDEVLIGKKMEPRYMEYNWRDIILYALAVGAHREDVAYTYEKYLKAIPTYGTIPYWGTVNVKPYQWMPLPASMLADEIIKPTISFLNMDHEIIMHRPIDPIKGTFQYQDVITDVYDRGEGKGAVVKTKVDVRDEAGNLVCTNYSTTFFHEAGGFGGKPMPKSEVVIPDRAPDLTLDDYITPVQNLLYRLTGDTNLVHVDSEYAREMGFPKAFIQGLCSFGFSCRMAIELLCPGEPERMTRMAAQMRNVLFPDTKVQLQIWKMEEGKAYFRFVNLEDGKPILDRGVFEWKMSFILTEEQEELLALVRKFSEKEILPYAHQMDVEAHFVPGLIQKIADLGFMGINVPEEYGGVGADEVTKALVIMEFAKYDASVAELLAVHTLSSDIILKHGTPEQKEKYLTKACTGAVGAFALTEPNAGSDAAAAKTKAISQGDEYIINGSKCFISNMGQDEGDYVILIVLTDPEKKTKGMSAIIVDRDTPGFTVPKTEDKMGLRAAPVSELYFDECHVPKSQLLGEEGKGFAIAMAGLDGGRIGMASQAVGLAESCIAESVEYSTQRVQFGKPVNANQGLQWYLADMATKTEAAKALTLNAAALRQAGKNITKEAAMAKYYASETAVEVANKALQIHGGYGYMKEYAIERQYRDARIIPIYEGTSEVQKMVISRAVINGKMDIGAKIKLLRIKNQLTLEELANRSELTKGFLSQVERNLTSPSIATLEDILEALGTSLGEFFSDDRDERVVFTANDYFINEQEAYDISYIVPNAQKNCMEPILIRLHPGCESETYGPYEAEEFGYVLQGKVELHYGKAQYMLKKGQTFYLKGDREHYLKNAGESEAKVIWVSNPPSFNSSASGANVVLGAKSSSNYMKYVFTYQGNGYYKIKNVGSGKYLGVTGQKSASGSNVEQASGGTRWQVMTSGTDPKGNQISYVYDKNYQQVKATDAKGNTITYKYDSMGRVIEESNKDFGTKLYEYDKAGNLKKYTDGNGNATVSKFDSLGQVLQSKDAVGNITKYEYDALGNETKITYGDGSSHSKEYDNCGRLAKETDELGAVTTYTYDAADNLVSKSDDSGRTWTYTYDNTGNRLSETNPEGGTTTYTYDKAGNLVSSTDEEGRTDTYAYDKAGNLTTSKDALGYTVSMKYDLNGNLVSSTDENGNTSTMTYDGNGNMTSATDAKGNITAMKYDSTDNLEQTVDALKGKTTYEYDSQGNSTKMTDALGNAYSYVYDKEGNNTSIILPTGDKVLMEYDAIGQLVKCTDAQGLVITYQYDGAGNLIHSSDNGGNSMDYTYDGAGNVLTQTDELGRTATYKYDQYGRLLKLTEADGSTTSYEYDVMNRITAVTDAEGHKTTFTYDKVGNQLSMTEEEEATYKYAYDKKDRVISQTNPLGASSTFKYDGNDNVTESVDENGTVTKYTYDKNDNLVSQTDGNGNTTTYQYDELDRKIGETSPLKETNEYRYDAIGNLTKSKDPMGLITEYKYDSLSNMTEQISPKGAVTKYDYDKHGNVISATDAKGNETQYSVDLNDNVTKMTQANGGEYTYSYDKAGRLKSMTSPLGYTKNFSYDKVDNVVKESDSLKSTTTYTYDKLHNMKSSTNALDGTTSFSYDKYGNLVKETDPLGRSNTYSYDLAGQMTSAADPLGKITAYTYDPAGNITEITKPGGRKTSYGYDKNYNVTSVTDPMGYVAKTVYDKDNRVTEETDALGQKESYTYDKDSRVTSITDKRGFTTGFDYDAHGNIQVVTDKTGLKSHLEYDKNDNLTKVTDALGGVTTYGYDNMDNLVTFTNAANKTTNYTYDLEGNLTSIKDPAGRTEKFDYDEKGRLTGHTQASGKKTTYDYDKLNDLLEKSYQDAKGEKSEKDVTYAYNSAGERVSMKDQTGKSSYEYDALGRITKVTSGSKKDVSYVYDDANNLQAIVYPDGTKVSYEYDLNDNLVKLTDRNGKVTTYKHDALNRVTEVIRSNGTKTEVSYDAEDHITKIVNTCGSCGKVISTYEYKYNDQGYVVGETATELEAGTRKTPSWEDWYNWGDTQKETDKADCEHQEKEIQTTRTYEYDDNWELTRCTEKAEGGKKTVHNYTYDKIGNRTSYEKIEDGVSKAKYNYKYNDSNQLIKRTNAKIWGDPGTTYSYDKDGNLIQECDKTNSADPVTYEYCLMNIHLITYLTSKLFWIYTVFRYNTILYPKNEDTQKLFAYFCAYLLSCWGSMQWGTMYGDLIFELIALLIITVAYQADWQHHVWNTLMVYIMGILCDDQWYRSERKSDQLRLMLELAICDDDIILCNWLEQKLLHYGKANDCQISIEIYYSAEQLLNRLEEESYDMLFLDICLEHENGIDIGTEIRKKNYGKELRITYISTYQEYAMKLFRIHPFDFLVKPIREEELFRVIGELRELLKERKKIFEYTDTKGIHKISYDKILYFYSLGKRVHIVTSEKEYEYRGKLKDVADVTEEYFLLIHKSYLINMEHVEHYEYDNVVMKDKTRLSISKANRKKVRERLLQTEKKRLMHIKSIVSDEDREELERMLSLGFIIPNQLFKTRQKSRMIIYIFTPVEFLLSINCYLSESYLMFGIGIGTCVACVAWIIWYQMIGKNFEKNVHEFVWGRSGYETVDIDENAIKIDEDQIYEFKNIDRMFLYKNFFFFITNEKKIFIFKTTDMESDELIKIIKTTGILFEKKEKPFNIYKYCKKGKSFMSDQNVKAAQKYLNAMFGGHKDWVKLDEDGKTGTAVMQGIIRAFQIQNGISTITGTVGPLTINTMKKLAIITKMDPNDTPQVNVCLIQCALFCKGYAAGGITGIYYTSGVNAVKKMQENAGLEVTGKIDWKVWSGLLSLNWFTKVSGGDSNIVLIQQQLNSDWSDVIGVGPCDGIASRQTILSLVGALQAAEGVTTELITDLNSVNFGDATTNAFPGTLQNGQNSTKYVPFNKIAQYGLYFNGYNPGRFDGVFDSTTESKVSEFQEFYGLTGIGLVTKGKVNVSTMKSLLTSKGDTNRAAKACDCATVLNKQQALDIKNAGYTHVGRYLTGSVGKEHTPKYLTSTEVKNIENAGLSVFPIYQDGGYELNYFKDPSQGSVDAQTAILAAERIGIPSGTTIYFAVDFDCYSYQIDTFIIPYFEQIHMIFFSSTNDKNYKVGIYAPRYVCTKVYEAGLASKSFVADMSTGFSCNLGYSMPKNWAFDQFCELNSFSSSPSFPLDKDAYSGRDTGFKKFDAVSTKTDEEIAQENLRAKVKIARNQYVYNVMEPLGYLNKIMDVGVEYDKEISLGTMMSPQGAIDISTKISTSLESSTGKIYNIKVDIGNDGELTQTCKNQIMEISSNLSDTGIEGADNFGNTIEKIALSVKSGNIAFEINNVFANSVEFSIVFSTSDLLPEEEKEWTISVALIFTMTLNSNSGLEFNVVEFTKEHSNILAGAVILVLAGALVVNAIPSIIALFSAGAGTVFGLLIQALMKDIKERVRDKNPKIRNPAARLPKELVRSAVLEAKEKPRELHEKSSGQSESPTQYGTEKIESVQYRAASVAGKSIGKTTYQGGKKLAGVTYRKIKERKSRQEEAKAAEEAMEQGAESGKKLIKLKPEQAALAKENGKRQVKAAPRVVKVSGLSQEKIKTQASMQKQQMEKSLQAMQKARAAQMARKSAQASAESGKAVLQVTGKGSKLSVQGITAAIQKGVVALEKMGKWIAAGGSAFLLVFILIVGIIAGAAFSSNSESSESLSEEVLAYTSVIQQYASQYGIPEYVSAIQAIMMQESGGRGTDPMQCSESPYNTRFPHTPGSITDPDYSIEVGVQTFADCIRQAGCSSPQDLDKLKLAWQGYNYGNGYIGWALQRGGYTEANALQFSQEQAASHGWSSYGDPQYVPHVMRYYSGGSLFAGLFGNQQIVSVAMGQLGNSGGQKFWSWYGFDSRVEWCACFVSWCADQSGLIASGNVPKFSLCSDGVSWFQGKNKWQSGGTTPTAGMIIFFDWDHDGTSDHVGIVEKCEGGRVYTIEGNSSDQVRQRNYAVDYSSIMGYGVINMKKKEEVTITFYAAECGEFHDLGEYTKCRTLEEAYKKYQKYCRTSANMCPAIEFSIHDPESIYSDMEYPLPLSSKDRGDLELVPYYNEHPLVNEAIRQVEQLQKQQEKKKHRDVARMIKTLSQALRMDKERFKVPKSVQQAIPIQRIWPDGIFQQGTKFSKTYRFTDINYYIASKDNKTEMFLDYSELLNSLDSGISAKITINNRRINKEEFEKSILLPMKEDGLDHYREEYNEMLLSKITGTNNSIYQERYLTVSVHKRSIDDARTYFARIGTDIVTHLAKLSSTAEGLDAESRLQIFRDFFKGDVPQAFPFDLKQFAKKGTSFKDWMCPDSMEFERDHFKIGDRYGRVLYMQDYASYVKDDMISELCDFSRNLILSIDILPVPTDEAVREIQNRLLGVETNVTNWQRRQNANNNFSAIVPYDMELQRKETKEMLDDLTTRDQRMMFGILTMVHLADSKKQLDSDTELLLSIARKHLCQMATLKWQQVDGLNTVLPYGLRKINALRTLTTESTAVLIPFHTQEILQPGGIYYGQNAVSKNLLVADRKKLMNGNSFRLGVSGSGKSFSAKEEIVHLALSTDDDILILDPESEFTKLVEALGGQVVKVSATSDNHLNAMDMDAAYGNEKNPLIEKSEFILSVFEQLVGAGNLSAKEKSILDRCAADVYRDYIRSGYTGEVPTLKDMYRQLMLQPEEEARGLALSSELFINGSLNTFAQPTNVNKKNRIMDYDIRELGEQLMPLGMLVTLDSIFNRVIQNWKEGKTTWIFADEFYLLFRYEYSANFFYRLYKRIRKYNGFVTGLTQNVEELLKSDTARLMLANSEFLILLNQASTDREELAALLNISENQLSYITNVSVGSGLIRCSGNIVPFENTFPKNTDLYKLMTTKPGESMEVKMNKEIRDYQESMFMGLDLRQCVCSVLAILTAIGIYFGMREITGQEITGWLCVLGATPFAACGFFKYHGMTAEQFLWAVIKSELLYPKKLVFQSEDIHYSCMQETISLGEKNQKDGAEIIKEREQRAEAKQRKKRKGRSDAFDMDIKKTLRYNWEFGRETVAIRVSSYRNNGNLYVGLCHKEGREWEDFGDVTINLPYQFLEPNEAFITGDFTKDMLHFIKEHKLGKVLNETGRSGYATYQKVAFDLARLAEFDPEGVAEHCRFAGIEVPKEKPQKTKKQSRGKERMSDNWIVQNLNSALSTWSEKMAELWTLLTENPATFKGGGIWRIMVNINDALTAIAYGLLVLFFAAGIIKTCGSFTDLKKPEHVLKAFIRFALAQGAITYGMELMQALFSIVQGIVTTVMSGSSMAGSVTELPTEIVDKIESVGMLESIPLWIVTLLGSLLITVLSFVMILTVYGRMFKIYMYTAIAPIPISSFAGEPTQSIGKNFIRSYVGVCLEGAIIALACIIFSAYAASPPAVGDTELSAVTIVWNYVGELVFNLLVLVGAIKASDRIVREMMGLGGMKKLLTGEKNRTKKNTTEKMITPMPMGRKQKKWMSLYMALVLTVTVGATTAFAAGDPLSVINNLSTFIFSLIRAIGLILLGFGVVQVGLSLKSHDPSQRANGFLTLAGGVIITFAKEILDLIMAMEHGSAKWGNVSEICRRYCEKQYTQNLLLTQHFRMGLDGYKHKRNLNVLVVGGSGAGKSRTYAIPNIMQCNCSMVITDPKAELLRKTGGVLERNGYEVRVFDLINPETSWCYNPFAYVRDDKDVLKLINNLIRNTTPKGAQSSDPFWEKSETALLQALMLYLLHEAPPEEQNFPMIMEMLGSAQVKEDDEDYQSPLDILFERLEMRDPESIAVKQYAIYKQAAGKTAKSILISVGVRLAAFNLKQIANLTCTDELDLYSIGEKKVALFCCIPDADTSMNYLVGMIYSNLFQTLYYVADRKYGGRLPIPVHCIMDEWPNVALPDDFDKILATMRSRGISCSIIIQNIAQMKALFKDSYESLIGNCDEFLYLGGNEKEGHKYVSELLGKETLDTNTYGQTKGRSGSYSVNYQQTGRELLTPDEIRLLDNRKAILFIRGERPIMDDKYDLKKHVNFRYTEDGGASPYDYAKTPLAHDDLKIDINRLDDYELLSTEDILGEMVIYSREKVARLREQYPAGTKICLNSMDGEAGMPQGLEGTVQYVDDAGQLGVKWDNGRSLSLIPGVASFHKKEGQGHPEEKPRKKRESDLQRMTKYYLKMDNIMKNMFVVALNDELQAQSEQDECLEETKALLKKVSEYDLAQKRLQITAGEQRQIRKALNRLRSKYLAAGRYSDGIDKVIIQVAKPNTSRHMFWMYMDLTDMISGGTEEQQIPEQKLTKEEYAVKKQQEREEVWAEVDSQAQGVFQDGEKLKGFLDFMAECNTQRTPNLLLIYGQHPDFKVVRSYERWREEHRSVKAGEHGITYMISTEYEKDGEMRRGYTIGKGFDISQMTGKPLEERPQRSLTELVGAVLKDQSVRVQIEDNLPDKVQAQYNPRYRTIYIRNGMSEVTTFHALNRELACAALDQHTGTYSRQKVSAQAYCAAYVIAKRYGVDVTGFNLEYIAQRNECGKKDPQELRDFLNDVRQASYSIRNHIERNFGAKEQEYITDEFAIGDPVKIPETKDEKPSEKASGKEKKAKSQPERMNYGAEPADQVVRYSLEGMEYSLKITGNVAKHVAIFIAAALKDQKKTRGKTRITRMLKEQRPMKFFTVPGDRLKEFAKEAKARGILYVVIKDKVNPDQTEVMVFADDAAKMNRVLDRMNLDFVKAESGSMVTEAVEKETAPEKAENQMEKETGENVRTETVVLPEGKIEFELDDAEEMFQIGDEAFPEGNFTHAQEGKAKNPSEPFSRNKNISSGRETSWEEKNEKPSVRKELGDIRKEQEEKRKRPDRRKNARESRKKRKNMKTKGRMAYTSVIPVHRLDRSIEYVKDKEKTTQKADSLEAAIDYAMNRTKTEQAVFEDTIGCTNENAYEDMVATKKRFHKIGGVEGYHLVQSFAEGEVTPELAHLIGQELADRLLKGQFEVVITTHLNTRHYHNHIVWNSVSMVDGHKYHSNAKSYYTEIRKISDDLCRKYGLSIIESNQKKSIPYVQWKAEQEGKPTWRTAIRLDIRESVQESYSWSQFLKEMEKRGYTWKLNRKYISLKAPGMERYIRLRSLGKNYSEEEIRGQILQPKVKRVYQKAVQIHPKKKLTGIQALYYSYLYQMGVLPKRPRRSPYAIREDIRKLDQRIEQIEFLMKHDITTREQLATYREPLQKQISELMKERRKLYRNDSEDSGKVRLSEINEELKNLRKEVRMTVRIEKHSLEIEERLRKAEEQNQNEKRVEHKEKESQEVRMRKRNHVIPVRLNARELRELEEQVEKSGLSREEFMRSLILGAQVHAKPCEHHPELLRKIAGLCNNANQLAHVANASGMASEQSVQEMLRLTKETWHLVKEEWMEQALAYVCCSAEESRVKVQKYCRKIYELGYVPICPRFVFSPFLEESDAEDMQGYGRMSHILLRRCRMVVVCGKEVTGTMNTEISMADRLHIICTTLDGLVQIKESKMTNGLSLEELMKEETYPEEYTEGENWKILHGDTLKLVKAFQPGIFDAVITDPPYASGGTKQNERNRTTNQKYSSMSAANALPDFDGDNKDQRSWTHWMAEWLYDVRKACKKGAPICLFIDWRQYPSITDALQWAGWIWRGTAVWDKGNSRPQKGRFRQQAEYIVWGSNGPMPINRPVSCLPGVFRYGNPQNRIHVTEKPLQLMKDVIQICEPGGLILDPFAGAGTTVLAAVMTGYRAVGIEVTDAYYKLGSDRVKIALEAEQKEDEKMSKYKITEIEHPKYPWLHRIQAVSDVNEKVPKGTIGGFVENENNLSQEGTCWIYDDAICCENGEVKEEAALYDGSLVRGYAVVTGDTTFYDRAVAKRDCYICGGEIKENAIISGKAFIDTVGVNAPVIGGESHVYGEVRGNIYIKGDIFPWDIFNNHTKDMFLYENGKWSAFSVPEKLKPPQSYQKRQTKKKNQPERMEEKGTMHVHLLTELTGNLYSEESEWEEEWSESDEYGMPLDGTELADYEEVIREELERYGEDDLMQYFDGSESIQGKIQSAVVTIENKDGILYGCTKLELNEFLSQEELQEFTEYITGQYSDGWGEGFEQRDIKVDGGTLNVHFWHPDMEQPKMYEKKTEQIPTKPEKQRPKLQLLGHNGNIFSIMGDASTLLEKNKQTAEAKEMRKRVLESGDYYKALLIISEYVETELSSPPKENKKAKKKHQPERMPWVTEEEIQAAKNMTAYEYLRTHQAQRLQKTRTRNEWQLTDHDSFKINELSSKWHWKSRDIGGVSALRFLIEVDGMKFTDAVKLLCEESPSFIPTQSAERQKPPFKLPERYCNCRRIRAYLNHRGISDEVITYCISHEILYESVPYHNAVFVGKDESGKARYAFLRGIYEKNGKGFKMEQTGSEKKYSFCIPPERETKRVAVYEACIDALAHMTLEEGKRDKYRLSLGGIAAPKDNAQIQSERFKKPPDALEEFLKNHPEIKEIEICTDNDFAGRWAKEQMKKHYEGTYQIICNLPEKEGADHADLAKEKKQTNKFRDRPLERRMRRFYTAESVTEGHPDKGCDQIADAILDECLRYDPSSRVACEVLATRGNVFVAGEITSGYEPPVFDVIRKVLEECGYCTDGIEMDTFVHQQSPDIAKAVSVSKEFRDNIGAKLRDRSRGAGDQGVMVGYACDDTPQLMPMPTVLAHRITRELSACRRSGYIKDIFSDGKAQVTVEYEDGKPVRLESVVVSCQHGAEKNLKKLDAEIREKVLRSALRLLPPDEDTKILINPSGKFVCGGFDADTGLTGRKLMVDTYGSMVPHGGGAFSGKDCSKVDRSAAYMARYIAKNIVAAEFASKCQVSLAYAIGVAEPVMIEVDTFGTGKVCADDCLAAAIPLVFGVTPVQIMESLRLNRPIFRQTAVFGHFGRKEFPWERTDKVLALQDAILMKVKNLKSRIAAFGLAVLMGVSTLSSANAFAAEQTDVGQEVQASEQAVTSQKEKAVTADDITKEISDETFAAETSMEGIHYDAEKEDVTLISIQDENGGEYHPDKAGTYIASYMVVPKDQSDSYTINRKVILTDTEGQAHAQDNGGEKQKSDTKSEDDSDSPVQNYTDVEIEASGEDASAQAIEEFKEDIEEGNVMVLSAAERATSSGSTVTLTKGRTIYYPSYLGNYLTCLFTVNGKIAYCLQSQKASPPSGSYVAQVLDSNKNLQKVLYYGYGGAGDLTGSYLSGKSEDEKYVYTHIAASYAYAGEAGFTGCNYNDLVNAGVIAYINYLFGQEEPPKGELSFSSTKLNAVRDGNIQKTPNITLSGDHRNYVTLSVPENVTAHNLSKGTSVTNGKIQIYGGDTFYLSADLLLTGSYASGSLYGSVGKTWRTLVLTTGDSKQDIGVFESETAAPVSFSVQWLNMTRIELMKKDVNTQNPLSGAVYGIYTDKKCENLLMTMSATGTDGKAVSDYFDSALKTVYVKEITAPTGYKLNTEVYKVAVTAGKTMTVTATDERVTGKVKIAKIDKETLAFKAQGDSVLRGAVYGLYAKEDIVHPDGTTGVLYKQDSLIAQGVIGDDGTLEFSELYLGEMYVKEITPPEGYTLDTTKYEVSVTYEGQDVAEVTRDLTVKEQVKKQAFQLIKISEDGEQTETDLVAGAGFKVYLISDLTQVKNGKLKPANGESYTASDFKNYDFSKEQVAVTYENGTAVPVPELITDTKGYAVSPELPYGSYVVVESTTPENLKTIDPFVVNVENDSREPMQWRVFDDRPFEFLLKIVKKDAQTGNTVLKAGASYKIYDVTNKKYVEQVVQYPKKEKISVFETNEEGYLITPQELKCSTYRIEEVKAPEGFVRQGSEESLYDGTTIISPLEQTTKGTYKENPQSGIVITVSSNTAHQIDPDTGAAIVEVEQKNDEQVGSLLLTKKGEQLTEVTGDSVLAKVKALVSKVRNAVSGKEETGIYKGFKYEETGVEGAEFEIYAKDTIYSPDGAKDEAGNPVVRYEKDDLVAKLTTDENGTAVINNLPLGTYYLKEVVAGENFVLNTEQKEFTLTAEDDTQAVVYEGVTYKNERQKVFVSVEKKDSVTGEKLEGVIFGLYAAEDILSNQGEVLVEKDTLLEKKATDAKGTLTFDSDLPHGKYYVKEEVRKAGYLPNEEVWNVDATYENQNLAKIELNKEVENQPTETHITKTDATTGNELEGAKLQVIDKDGTVVEEWISTKEEHVIYGLPEGSYTLHEELAPYEDGYVSASDVTFEVKEDGSVTKVEMKDEYSKVEISKTDLTTGKELEGAKLQIIRKDGTVLEEWITDGKPHSVAKLPVNEELTLREITAPDGYEIAEDVTFTLKDTMEVQKVEMKDARTPEKTTEKTNAPKTGDNQKVWPFVLLALASAGTATGVTVYCRKKSKMTDNKEETEVKMEERYYFAYGSNMNLGQMRFRCPDAEVVGNVRLEDYRLAFRGRAPGNGVATVLPEKGSCVDGVLWKITEACEKNLDFYEGFPNFYGKETIQVKDQAGTAREVFVYTMNSPHKDVPARPSKFYLDGILEGCLENGLPTKSVMDAVKRTRQEMKKAEKQYTRMIGIQDQYFGTEIEMTGITRQRAAEVVAELFGTEAVYEGAYYGIWSARDREGKKWKFMSDGSIDTQRKSGGRIVSADGEYSTEMVSPKLSYDEMGKLQEVVRCLRRHGGFVNESCGQHVHVDAANHTPQSLKNALTIMYAKEDILFKALKVQERRANSYCQRVRPDVLEKIRKIPNRSITMDRVRNVWYGGRDGSHTHYDHTRYYALNLHAVFSKGTLEWRCFESTLHAGKVRANITLALAISAQAINQRSTQMKKTPISENPAFTFRTFLLRLGLIGEEYKNVRKHLLVNLEGDLAWRYDKSTYECLKKKQRTEDVRSRMVTNRYRETNRRYEKNHAAFFYQQRRLITATIQFFDLFSGIGGFREGLRRAGGFTCVGHCEVDTYADKNYRLLFDTEGEWYCSDARTIEPERMPDFDLLCAGFPCQAFSIAGKREGFADARGTLFFEIARLLKAKRPQYFILENVPGLLSHDKGRTFCTILSTLSQLGYHVEWKVLNSKDFGVPQARKRVYIVGYLDFRCAGKILPEPETNGAALIQIRAGSQGKRVYSPKGLSCTLTSQAGGMGGKTGLYDVGVPIKENTKLGYKLAREGDSIDLGYANLNSRRGRVGHQIAHTLTTGVQQGTLHFVDLSPPPVVTEECRSLNTRQCGVHKYKGECSGVLAEDGARAVLTPAKENVRQNGRRMKKPEEPMFTITATDRHGILYHGRIRRLVPRECLRLQGYYDWQIDKIIDCTSDAQLYKQAGNGVTVTVIEAIGALLRKADAERKELELSEKGMTEMKNICGKIPKDLHEKVREEIELTESSTQKFIQQVIEEHFERLAGKGEMSMGTARTIAVQVSEELFQRLKTVIAKKGMKQKDFLIQIIEEALEKAEAEWQNKDSMEEAEPATGESEKEETQPDEETEPDEETEPEGENEPDEEAELKEESEPDEETQPEEETKAEEPTEWMTRPVYSFRPNLKNPEHKKAWEKFQSVPEGQKNQYLVQAILEKEDRKWMEEIIQKTIKESVRELNICGSAEQSGTNPPAEDIPNQMMNFLSQMENMMIAIIIGIDHGYYAIKTRQVSFPSGIIGYDYEPYTMQNVLQYQGKYYVCGTGRQTLVKNKTSNDNYYLLTLAAIAEEIKHRKAERKTEVILAVGLPLSSFGREKQGFREYLLRKEQPVRFLYESELYEITIKDVKLFPQGYSALALHPEYLKNEPSVLLVDIGGWTVDLMRLDNAVPNAATCRSLELGVIRCIDETAEQVRRNTGLSVTETQIERVLRGESCSMVEEARRIIQENGRKYIERILSAVTESGFDLRAVPTVFMGGGSAILKRHVTAQDAICRPVFIEDVHANAAGYERIVEQMWAKMEVSIHELLAAAREAVKSDYIKGESILCETRYHPDTHYMVEIEMLKTDNTLGKKGAYIRKFLTEVEYSSMLQKQEEHLIKIKRQAIVQKGTLRYIPLPDRLDSRRERDILMSESEKEKKIFLSYCGSRDQELLTGRKKMTLGDMERFSFLTEFFGLESYGLNLWKEFGDDVEEPLDALIKLLDEWEYENDTWIDDDGRLERWLVEFQKHAPTKEKREKLRKMIDLKYKKRGLPYPTEADFDMQKIRPDMDIGKNIQSLRYKNNLTQDQVIAKLNLMGIVISKSTYAKLETNRMNIKVSELVALAKIFHTDINAFFDGLLMESDIIKISHLNKSFGEVKAVNDLSFRVKKGELFAFLGVNGAGKSTTISILCGLLKKDSGTVQVNGIETDKAGAQTKRMLGVVFQDSVLDKPLTVEENLMSRAALYGITGNAFDKRLQELVEILDFDEFLNRPVGKLSGGQRRRIDIARALLHRPEILILDVNWCNKIACIMGNRKEEILIVALHLFARDGYEAVSVSQIAGELDMTKGALYRHYKSKRDIFDCIVQRMEQQDGEQAVEYDMPEEEKEKMPEQYENVSLDDLVEYSKSMFEYWTEDDFASSFRKMLTIEQFRSEEMQNLYQQYLVAGPASYVKDLFESIGIANAKDKAAGFYAVMYFYYSMYDGAEDKQNVKDEFVSAIKSLVQELKMMKLIQNIDVYAPQHLGKKDVLTINDKIVKIKDAGSISADGFLSEAEMINGEGLLLTPGFIDSHVHVLGGGGEGGFANRTPEATMEGITKFGVTTVVGCLGTDGIGRDMCALVAKTKGLNEQGMSAYCYTGNYQIPVRTLTDSIAKDIMMIQEIIGTGEIAISDHRSSQPTFEEFTRVVADTRLGGVLSGKAGIVNVHLGDSPRCLDLIERVVDETEIPASQILPTHINRNEMLFGKSIEYALKGGAVDFTGNENIDYWETIRDEVRVCNGIKRMLDAGVNPDRMTISSDGQGSLPIYSSDGEFLGMGVGQSSCLLKEVKECVFKTEIPLEIAISTITSNPADILRLKGKGKIEEGYDADLCILDQELQLVEVIAKGNTVYTKMQTYTYVSKGKFELREKSKPVIMHERDAIVKVTLASICSSDLHIKHGSVPRAVLGITVGHEMVGIVEEVGGAVTHVKPGDRVTVNVETFCGECYFCKKGYVNNCTDQNGGWALGCRIDGGQAEYVRVPFADQGLNKIPDEVTERQALFVGDVLATGYWATRISEITEDDTVLIIGAGPTGICTLLCVMLKNPKHIIMCEKDEERIQFINKHYPDVLTVSPEECEKFVKKTSDHGGADVVLEVAGAESTFRLAWECARPNAIVTIVALYDKAQSLPLPDMYGKNLIFKIGGVDGCDCDETLKLIADGKINTEPLITHTYPLSKIEEAYDLFENKRDGVIKVAVECWHMKQETIDRIRKFTEDREWEQFHSPGNLAKSIVIEAAELLECFQWNDKEYDLQHVKEELADVMVYSQNLLDALGLDADEIINMKMTMNEAKYPVEKAKGSAKKYNELMAWEHGNYASSQLCSVCGYQNTEIKDLSIREMNLSGEKMTGFSSLQKHSDYLVTIVRFVHKRRRKEWKSNVSIQDYPTDYDVEMECRNAIYSKIWTEETKVGLRMKQTQNNSFDSQQVLSVIEQYSTALDLLDAYDHQAMERPKGNEAAYVLTYEECMHVIACMRFGKESDLFGKEKDDSFKGSIGNIYQSFAGMEVYPTLEEKAAHLLYFVTKNHSFFDGNKRIAAAMFLYFLDKNGALFANGQKTIDDHTLVALTIMIAESRPDEMEMMITVVMNCMKMKVQRILDAAFFFVEINIFFGRLAGERIECCKNDIIDDNLYCKNDKISADMLYMDTVKIGKYIAGKRKALGMTQAQVAEKLGMSDKSVSKWERGICLPDVSVYMALCEILGISLNEFIAGEDIEPAEVLQKSEENLIQVTEDGEHRKRKLKKIIVLLAVFGSVMAGILIYLLTFKNQPRVNYIEPLAQDSTEMNIAGMLSDADGAFLYDYAVDKKIKGISFELAVYKKGVLESESSLGTISWSELEQISLRNGMIAVIPDFQNFKVKLIVAGEGTKFSTEFNILEDVQGRNYYGRSAKSIDEGKITIQPGKEIGILALYYAKNALSVTPFSDIENGNMDSCNDEVYYLTVKFEKDDDALNMEFKDVVYGRRSVRRFKDTPVDDKILEEIVDAALWAPSGVNLQPWYYVVIRTPEKMTRLKEMMSVVSDRDRPHLEERFSAHPEVVKTTLSFISTLGGAPAVVLAFRDKPDYTWALLDEGVVQSVAASMENLVLSAYDHGVSSCWMTAANQAHMTKDLRDEFAPGHGELVGIIALGYNAEEEAPKAPKRKADKFVLIMKKINFNEVIKEIIILTAAVAIIAAAVYFFLVPSHTSVSSISGLGIVLSNFVPLPLSAITMILNVVLLIIGFLTCGREFGVKTVYTSIMLPVFIGIFEKIFAGYDSMTGSQELDVICYILVVSVGLSILFNRNASSGGLDIVAKIMNKYLHMELGKAMSLSGMCVALSAALVYDKKTVVLSILGTYFNGIVLDHFIFDHNIKRRVCIITEKEEALRQFIIHELHSGATIYEAIGAYNKEKHNEIITIVDKSEYQKLMAYINREDPKAFITVYNVSHMQYQPKVWEMKKWVCTVCGYVYEGENAPEFCPVCKAPASKFKEQSGDKTWAAEHVVGVAQGAPEDIMADLRANFEGECSEVGMYLAMARVAHREGYPEIGLYWEKAAYEEAEHAAKFAELLGEVVTDSTKKNLEMRVDAEHGATEGKFDLAKRAKALNLDAIHDTVHEMARDEARHGKAFEGLLKRYFGMKNIHGGDIYQYNNILDFSANINPLGAPESVNRSIADAIGQIGHYPEMYSDSLRKAIGEKYHIDSSQIICGNGAADVIYRYVYAVRPKKILVTAPCFAEYEGAWQSLWASYDVPETAVYSLNHQDFCIKEDILTLIEREMPEVIFLCNPNNPTGVLIPVQILASIAECCKDNKIRLFLDECFMDFTGREEENSLVEKLKEYPNLMILKAFTKMYAMAGVRLGFGLTADTELIDRMYQAGPPWNVSVLASAAGKAALKEDDFVKETVQYIRKEKEYLYQALDTLRVQYWKSAANYILLKADRDLKERLIAAGILIRDCSNYRNLSEGYFRIAVKSHADNEKLIAALKVVLERMDRHEYMTTGEFASAMGVSKDTLFHYDDIGLFCPEKVSENGYRYYSIYQMETFDTIRMLRDLGMPLKEIRDMLAHRSPERVMHVFAEREQQIDREIEKLRAMKQWLSRRREKIADAEKTDFSEVTIQAFSERYYLYGHVADGLEKSIYRKTSELIAEFKKSGMRSDYDVAYIQYDENVQKGKFTEYDNTILLVDERPATGQYEILPGGRYITAYHVGHWMNIGQTYERLLQYKEQHHLKTESFYIERYVVDNFIAKEIEEYVTEVAVRILDASDRMSHSINGHFTPASLLKFAAPSIIMMMFMSLYTIIDGIFISRFVGSNALSSLNIVYPIINIVFAIGTMLGTGGNAIISRYMGEGKDKEAKECMTQFVVISLLISVVILVLTHMNLTSISRILGASDLLLADCNSYLSVVVSFAPAAILQCLFQSYFVTAGRPNLGLVLTMIAGILNAVLDYVFIVVCQMGISGAALATGIGQSIPAIAGLLFFTFSKGSLHFTHFKLHLRELGQACYNGSSEMISQLSNAIVTFLFNIVMMRLAGEQGVAAITILLYGQFLFNAFYLGFSIGIGPIVGFQYGAGNKKELKNIHRIAFLFVGISSVLLTIAAVTLSTPIVSVFTHDADTFRLAAPGFKIFAINFLFSGLNITSSGFFTALSNGLISAMISFCRTLVFIVLSLLILPTFLDLTGAWIAIPVAEFLTLLLSTVMHVRYFFRPGKQNYFIMTFYQELQLSSAGSKQLIKNTTDKKEKRRHILIYNFKVYLVMTFCFALVTLYSMIFGSDNSVAGVVFLLALLVLRQADFGIRTHHGLLCIVGIFAILIVGPRVSNMVSPWAAFVINIGCIFTLMLLGCHNVIMYNHSTFVLGYLLLQGYDVTGRSYYLRVISLLVGMLICMAVFYKNQRKRPYRRHFLDIFREFNIRSARNWWYIKLTLVVSTALLIFSLLGLPRAMWAGIACMSVCLPFSSDIVERAKKRGPYNIVGCLIFLVLYYILPPSMYPYIGIIGGIGVGYSAGYAWQTVFNTFGALSIASGLFGAAGAVALRIGANVFGSVYTVLFDKAMNGLIQLVNSRECRKAVMRNTEKDKYWREMIRKQGELRHFGSMAIRKSSKGDLASAQEVDLLFRVALSGGMMTPGQLAADMGVSKTIISRLIDSLEKKALIIKERTLNDRRSYGIRVTDDGKEEVDRMYYYYLDPLYTLREQMTSDDFEKLFRLIEAANTILSNANSKMSNYSIFLPSYSVGEECYKEIPYVTRKYGKKAVAIGGKTAMSKAKPELLKALEGTDFEITDFIWYGGDSNYENVEILKKHPEVINADMLFGIGGGRACDTVKILADMLDKPFFTFPTLASNCAACTAIAVVYNQDASFKEYYYMKTPAYHTFINTKVISDSPAELFWAGIGDALSKEYEVLFVTRDKPMYHTPLMGHCISTICTEPLLTYGKQALEDCRQRKPSFALEQVALDIIISTGIVSNFETHEAQPDPKDDYYYNSTLAHCVYYGVSTIPAAEKHLHGEIVSFGVLCLLTYDGQIRERDKIMAFNADMRLPVTLEEMDLTTEDVDKIVKKASSVIEWQFVPGGASEEKFKNAILETDEAGKSYLAQHMVKTVTVSQVMGCGAQRGYKKRVRGTEVDVMMLPKIKFEIVVSSEEWEQKTIAAIQKAAFTGEVGDGKIFSYEIRSAMKIRTRECGYDALNMFIVQLIEATYNFLWGDLFQIPLPVGGSIGISLLILFLVPAAVYFTIRTRFMQVRLFPDMVRALTKQKSGENGLSPFQTLIVSTATRVGMGNLVGVVAAISAGGAGAVFWMWIMAVLGSATAFIEATLAQLYKEKDPLYGGYRGGPAYYIHRFFERKEGRKKRYVLPAVLFAISGLICWCGISQVISNSVSESFNNAFNIPPLYTTIALVILAAVIVLRKNATVKVLDVLVPVMAVLYFVITLIIIGMNITALPGVFQRIFEEAFGIRQFAGGSFGAILMNGVKRGLFSNEAGSGSAPCAAAAAEGKTPVTMGLVQSLGVFIDTIVICSCTAFIMLLVPQKVTDGLSGMALLQTAMEFHLGRFGVIFIAVTLAMFSFSTFLGILFYARSNVAYLFGDKWCWQMAYKVLALVMLFIGGIAAYTFVWDLGDVGIGLMTLFNISILYPLSKEAFQALGQYEKEKAEKMFYLNLIHVTIKFMYQTHVSASEIQHFSLCVVFPADILFYPVIKEVTVMNQQKIGSFIRELRKEQGITQEQLAEQFNVSARTISRWETGHNMPDISLLVEISEFFDVSIPEIINGERKSENMNEEVKEVAEKLSDYAGEEKINMIKNVRNLSITGVCALILCYILEAAGVSGQNSFFEKLYLYCETLVPVTITMIVFYSTGLINKLHRKNRSSVLDNFPKAIRIIITAVLAFAVAALLKLFLSNVLGLMRKSGILMHLASLPSEYGVGTMGAAARKFADFLSDAGQQYWQLLPICPTSYGDSPYQSFSTFAGNPYFIDLDLLASEGLLDKKEYVSVNWGDDVSRIDYGRLYEQRYPVLKLAAKRFLENEPEDFETFCELQAFWLEDYALFMTLKDTHGGCSWWQWEDELKRRDHSAIDKVRETMAEQIAFWKVLQYFFFRQWKSLKQYVNDKGIDFIGDLPIYVSQDSVDVWAHPELFQLDENLMPKEVSGCPPDGFSATGQLWGNPLFDWDKMAEDDYAWWVGRIDYFCHIYDVLRIDHFRGFDSYFAIPYGAETAKDGYWKQGPGMKLFNAVEAKIGKQPIIAEDLGFLTDSVKKLLADSGFPGMKVFELGFDSRDTNGNGYQPHNFIRDCVAYTGTHDNDTIQGWFASADPVDTEWAREYFRLTKEEGYHWGMMRALWGSVADTAIVQAQDLLGLGSEARMNEPSTVGRNWQWRALPGVFTEELAQKIHRMMVLYERVNMTIKDIAKEAGYSVGTVSRVLNNHPDVSDKARKKVMAVVKKNHFKLNNNAKHLKQQSNSGIAVIVKGNNNMLFATIVEKLQGLIKERGYVCLIYYIDEDENEVEQALQICRERQPMGILFLGSDLEYYRGRFGDAGIPGLLVTNSAEGMELENLSSVSTDDEGAAQTAIEYLFTLGHREIGVLGGKLENSYAARSRYMGCRKAFELRGRNFDRSRQYEGARFSMEDGYHGMLRILNKMPEVTAVFAMSDVMAIGAIRAIKDRGLRVPEDISVIGFDGIVLSQYMCPRLTTIKQDSEIIARRSLEILLGNIREELPVTYERIPSLFIRGESTCALSVQNKGDEKKMKNKKTLSWIGTIFFTILGLIYIAPIIIVLLNSFKKKSFINLEPFKLPSAKNFIGLDNYTTALDQYGLLKAVGWTVFITVGSVIVILICTSMCAWAITRVKNKFTNAFYLLCVFSMVVPFQMVMFTLSLIADRLKLNTPWGIIIIYLGFGAGLAVFMFCGFVKSIPIEIEEAAMIDGCNPVRTFFSVVLPIMQPTYISVGILETMWIWNDFLLPYLVLDINKYKTISIAIQYMKGSYGRVDMGAIMAALIMAVIPVIIFYLACQKYIIEGVAAGAVKGMEKAIKRYLPIFVLPTLAAFIIGFIAPFIMGVGLSFCEFTTVKDAKFVGISNYVKAFQDTIFRHSFWYTALFAIVSLIVINVCAFALALALTRKMRGTNIFRTIFFMPNLIGGIVLGYIWQLIFNGILAKYSTALALNQWLGFWGLIILVSWQQIGYMMIIYIAGLQSIPGEVMEAAQIDGANSWQCLWKVTIPMMMPSITICTFLSITNGFKLFDQNLSLTAGEPSKLSEMMALNIYNTFYGRSGWEGVGQAKAVIFFVIVVAIGLIQLRATRSKEVQQMKKRSLLALAMVGALSVSMLAGCGSSSTKETQAPAGSEAATEAATEAAKESTAAGDGKVYYLNFKPEQDAQWQELAKLYTEETGVPVTVLTAASGNYETTLKSEMAKTDAPTLFQVNGPVGLASWKDYCYDLKDSKIAGELTNDEFALMDGDSMAGIGYVIETYGIIYNKALLEKAGYTQDDIKSFDDLKKVAEDITARKDELGFSAFTSAGMDGSSDWRFKTHLANLPIYYEYKADDINTTDAIKGTYLDNYRNIWDLYINNATCDPSLLSTKTGDDAVAEFVTEQAVFYQNGTWAYNDVAELGDDNLGMLPIYIGAEGEDKQGLCTGTENYWCVNNKASEADIQATLDFMYWCVTSEVGTKAMCGGEGAMPSGDAGMGFVIPFKGNLESSNPLVNIANQYVADGYTPVAWTFSTMPSEEWKNGVGSALTTYAADQTDDNWAAVVSAFVDGWAKEAAASKMENNMFCFQCEQTAGCGGCTGRAGVCGKQADTAQLQDQLTGALIGLARAAEGNVPGPSTDKVIIEGLFTTVTNVNFNNETINALIDRVHEEKHKLVPDCESCGSPCGRTEDYDMKGIWGADEDIRSLKSLILFGIRGMAAYAYHAAVLGYTDKDVNQFFYKALFVIGENWKVDELLPVVMEVGEVNLKCMALLDKANTETYGTPEPTTVPLTVEKGPFIVVTGHDLYDLKQLLEQTKDKGINIYTHGEMLPAHAYPELKKYPHLKGNFGTAWQNQQKEFANMPAPVLFTTNCLMPPKASYADRVFTTEMVSYPEIVHIGDEKDFSPVIEKALELGGYKEDQHFTGINGGHEVTTGFGHGTILSVADKVVEAVKAGDIRHFFLVGGCDGARPGRNYFTDFVKQTPKDSIVLTLACGKYRFNDLDLGTIGGLLRLMDMGQCNDAYGAIQVAVALANAFGCGVNDLPLSMVLSWYEQKAVCILLTLLHLGIKNILLGPTLPAFISPNVLKILVDTYNIGAVTTPEADMARCLGMQSMREYFPVIKKSALFQGISEDDLDGMLTCLGARTASYSKNQPIFWEGEPASLIGVVLTGKVQIAKDDFFGNRNIISMMEPSQLFGEAFACAGIEKLPVTATAVTDSEILLLDCRRVITTCGNSCEFHNRIIANLLRIVAAKNIMLNQKIELTSKRTTKEKLMAYLLMQAKQNKSRIFAIPYDRQELADYLGVERSAMSAELSKLRREGRIDYHKNQFKILEMKIKKRLKDKAGMLVLTAVLVVAALIASVVSGCTEQVKAAENEVSAETSADTDNSSHKETKTTDADKNGSKNAQVSDSDKSADKGSDKTDKTETVYAKADSSGKIYDVSVEAVLKNEGEGEITDYSTLSDIKNTEGDEEFTEKGSNVVVWENHGEDIQYKGTSTDALPVDVKITYYLNDKQVTADELKGQSGKVRIRFDYTNKYSQKVEVNGKTVEVSTPFVVCSAMFLSSDNFSNIEVTNGKTVEMDDQNIVIGYAMPGLSDSLQLKNYEATEDVDVPEYVELTADVTDFSLDFTATIIFNGMFGNMDTDDLKDVDDLIDAMDDLSEASDKLVDGAAELADGADELGDYFGQYLTGVSAMDDGSAGLMKGLKTVNDQKGALLEGAKGLQQGLETLNQSLATVNLDGQSVDMQPMSAAAAALAQDTAKLKEALTVMQSTLNDVKTFANDAKSYKESVQKKTSEAKGTLDAVDLSEAEKKAESEAKEQASKAVKEALAGTDLTDDQKAEIQSKVKDSISISDTTDTASGKIAEAKDALKDMPDLEIPEFSLGTDTITVLVEDMQKQLQVLGQYSEALSNLGTQMSGLSGTLEQLKSGVSSLASGSGQLTEGVQALNDGIEQLYQGAVALNDGTGQLITAGNVISKGFDGLSEGTDALSDGMKEFDKEGIQELKKLAGDDLENIITRVRALKKADEQYNNFSGLEKGKTGSVRFIVETDEIKKMKNPLNRRLTRELKGELGKYLVILILLIATIGFVSGFLVADGSMLTAYNESFEKYNIEDGHFTVVKQMNKAQKKNVEALGVTLYDLFYVEETLVTNDSTLRIFPDRKDVDKVCLMEGSMPEKSDEIAIDRMYADNNSLKVGDVIASTDHSWRVTGLVALSDYSALFSDNNDSMFDAIKFGVAIVAEKSFAQLDQSKMTWQYAWKYNQSPKNNIEEKEMSDDLMSDINSTIVLDSYTPRYLNQAINFTGEDMGSDRGMMIVLLYMVIVIMAFVFSVIISNTISKEANVIGTLRASGYTRSELVRHYMMVPIFVTLIGAGIGNILGYTVLKDVCAGMYYGSYSLPTYVTLWNSEAFVLTTIVPVVLMAVITFAVLSYKLTLSPLKFLRRDLSRRKQKHALPLSVHIPFFNRFRIRVILQNLSNYLVLFVGILFANMLLLFGLGLPVVLDHYKATIGDNMLANYQYLLQMPVGAVDEDHKLESMLNMMMFSRSVETDNPDAEKFSAYSLKMQQNATRTEEVLLYGIEPDSQYIHLNLQPKDVYISSAYADKYLLQPGDTITLKETYEDKSYNLTVTGIYDYEGALDVFMSREALNDMFDLGSDYFCGYFSNSEITDIDSKYIGSLIDIDDLTRISRQLDQSMGSMMYLIDGFAVLIFVVLMYLLSKIIIEKNAQSISMNKILGYTNSEISRLYIISTFIVVAVSILISMPLVYEGLVYIFRWMLINSMSGWIPIYLGKSIYVKMFIMGVVSYGVVALLEYRRIQKIPMDTALKNVEMFLEINQIRKSYGSGESRVEVLKGIDLYVEQGEFCVLLGPSGSGKSTLLNIIGGIDQADSGDICIRGERMADMKEKKLTLYRRKHLGYIFQMYNLIPNLTVRENIEVGAYLSEKPLDVDELLHTLGLYDHRNKLPNQLSGGQQQRTAIGRAIVKNPDILLCDEPTGALDYNTSKEILKLIEKVNQKYGNTVIMVTHNDAIKDMADRVVRLRDGMIRKNYLNEQKLSADALDWMIDEYVPCEDILSQINAAKFALHKAGQVVLKGHIQHCVRYNIEHGDADKTIANFTKAVEHFANMHMCRSNLDYIIFECLAERTIGLAKQEMLKDPTLTLASLRYEYGWTSNDADKMGQCVLAGHGYNVTTFNVPVTYCGTNDEIKGQYQLAIWENHADPIICGREQLGYSKIYADITDICEEEDGTYAALSSWNFEFLKLHFKMDEKPDDLSEMQKVLFDEENEGIMHYKYIPHSEAGFNKADVQYVTITPKTFPAPEDAKPLPQPERVWGNASLEWWIPEWKDMPTQYHIVQVLASLPILRVVGASKVHLWHYNDVYHQRAIEMITFYKEYGSVQTVSERLSWSHYCELLSISDKAKRHFYEIECANSRWSVRELRRQIASSLFERLLLSDGKANKQKVLELSLKGNEIVKPQDIVKDPYVFEFLGIPENKPMMESDLEEALVRQIEKFLLELGKGFMFVGTQQRVTFGNVHYYVDMVFYNKILKSYVLIELKTIKLMPEAVGQLNMYLNYYAAEVNDEDDNPPIGLILCTDKGNVDMQYALGGLSNNIFASKYVTYMPDKEQLIAQVEAVLSLKDKEKKMDKLVDNKMINKIEKLLQEARTHVAVEVNNTLLRTYMEIGKLLVEDINLHENEENYQNKTISMLSKELTRKFGKGFHVPIFGIMILTYRQCLEKYGTDYRIKKAIEAGILFQKEKGLYSDKKICSELELMTAKYPRAIFAGSSAYYYYGLTDIIPDYYCLTTKREDSRIKDKRVKQSFVNDDLYDIGKCLIEYQSVKIPIYSRERLLVDLIRFRGRIPFDYYKDVIGSYRRIINDMDFFSMEDYAEKVKGGKKIMDAIQLEVLMVNMQTNRSPLETEPLTKLLFRYSVPTTLTLMVNYIYNIVDQIFVGQGVGITGMAAINIAFPLSILVNAVSLLLGDGCAANVSLCLGRREQENANKIFGQAVTWIVASGIALAFICGIFAPHIVTLFGTTNTAYGESLAYMRVIAIGIPFQLICPAFTAMIRADGSPQYTMKCMMAGAVVNIILDPVFIFGLKMGVVGAGIATVIGEMAAGILCLLYLRRLQSVQLEKGALRPTWPVLKMILQLGFPSLLTQGLTALVQIVLNNLMRVYGEASIYGSDMALSVYGMMMKVYQLAHSMFVGVSSAIQPINGYNFGAKNYQRVRQTYRLATGIAVVISAVWWLVYMVFSRQIAGLFVADNQLYFDCTQHCFRLYMMAFFLYGVHMTTGSFFQGIGKPTRSLLVPLIRQGVLLIPLALVMSRLIGLDGALLAAPAADTVTCLLCVALARTEFRRWEKAGMLMRKVSLREIVADKIVFAILIALYYWMWARNDWHNYYTSIQYAVFAFTFFYFISRASRLKKYKQELPDEMSEANLKRCDALCLKIGAAAIIVLSFVCAIGRLSITTDLIGYCLMGILIALAIIRTILFYIMDTKGVMALLTNLKTYREKYNLKQADLAELVGVRRETIVNLERGKYNPSLKLAMDIARVFHTTVEELFQYTDEMKKYLLFLGIIGLFALTACGKQVKMSDVTIDYGSSSIYSKEDMDAAIKAIKTIFKDFDGCELHSISYSSDDQCNTPDHIAWMNELEAANDNKETFDQCIMFTSDFHSPKNGGGAWNPDEEYTGWQWWLARSNGGKWKLMTWGYMKPLSDKTAGFTDSVIRRMTRVSNQYGAVNLSQGFPDFDPPKEITDRLREIAPHGPHQYALTWGAQNFREALARKHEHFSGMKVDPNKEIVVTCGSTEAMMASMLTVCNPGDKVVVFSPFYENYGADAILSGAQPIYVPLNPPEFNFDANVLEDAMKQDGVKALILCNPSNPCGKVFTLEELKIIADLAIKYDLYVITDEVYEHILYKPNKHIYMATLPGMRERTIICNSLSKTYSITGWRLGYVIAPPEVIDRVKKVHDFLTVGAAAPLMEAVVPGLNFGDDYYIELQNHYTHMKNLFVDGLKNIGLTFTEPQGAYYVMVDISEFGYKDDYEFCVDLAEKVGVGAVPGSSFFREDVNQYIRFHFAKKDDTLNAALERLADIRKILKKMKEALLSIIKDENRIITGPIDPQYLSDNLGRKKGTAEAVVFPVSTEEISGVMRYAWKNNLPVTPRGAGTNLVGSTVPSGHGIVLDVSLMNHILELDEETFTATVEPGVVLEDFQAYVESKGLFYPPDPGEKKATIGGNISTNAGGMRAVKYGVTRDYVMGVELVLADGTVVMAGGKNRKDTSGLDLKEIVIGSEGTLAVITKCILKLIPKPEDSLSVLLSFDSLKAGIESVRQIIQANLNPTAMEFIERKVIQLGEDYLKMSFPEPEASAYVLTTLDGSRNEINDHLEELRKVAKESGALSILPLEDKEEAARVWKIRGMLVKGVEAVSEQEPLDIVVPINQIDAFVNFVNAFEKECGMRMISFGHAGDGNVHLCVVRGDRDDKTWEKELDANLTVLYDKAYALGGLASGEHGIGLSKQKYLLKASKPENIALMKRVKAAFDEKNILNAGISYNVMKKKGIIALAVTAALALGALTGCGNTTAKETTGSTDAAAETTKASETAGSEAAGSETAISGETRVVKLGLTGVIYEDIWNPIKEELAKEGIDLEYVQFSDYSLPNEALNAGEIDINAFQHHAYFNNDVEKNGYDITPIADTFIIAMNLYSDKVKSVDEIKDSDVIAIPDDASNGGRALKVLASAGLITLKAEAGANPTVADIDTYNVKIEIKEMGAADIPSVLPDVTAAVANGNYALDYGIDPSTAIFEEKDYDDDSYFCLMAVRSSDADDVVYKRIVELFQSETTKQIFQDEFNGYFVPAWEVQKMVELLNQWLPNVMDRPDVFIKSIQETFIMVGWSGAISFVVGLFLGVLITVTKPGNILEHPLVYQIIDKVVNLFRSVPFIILLACLVPISRLIMGTAIGVKGAIVPLVFGCAPFFTRQIESALADVDPGLIEAAQSMGLDNKDIIFRVYLKESIAGIARGTTITIISLIGLTAMAGAIGAGGLGNFAIMYGHQRNMPDITYTTVVVLVIIVTVVQLIGNYIAKKNTHMIRFEHVSRVFHNDGREFAAVNDVSLEIEKGEIFGIIGFSGAGKSTLVRCINLLERPTSGKVFIGDEELTAMSPAELRQHCKKIGMIFQQFNLFASRTVYDNVSFPLKGSNLTKEQKDKKVRDLLKLVELDEKASAYPSQLSGGQKQRVAIARALANDPEIILSDESTSALDPRTTRAILDLLKKVNRELGITIVVITHEMQVIKDICDRVAVMKDGRVVEKGTVFDIFANPKEQITREFVENTSNMSRIYELVETKSPVVELKPGEAILRFRYLERNVSEALVSQLSRKFDLDLNIIFGSIELIGENPIGGLVVIAQGTSDNINQAIQYLKDKNVGVEVILDGRTAMELKKLIYTVNEDGIAVITMNYMKNLNAIDEQMADELMYVVDAAEKDPNVKVVVLKGTDRAFSAGGDIGYFYELIQAGGEVNMDGLISKVGVVADGLKRMSKMVITSVCGAAAGAGVSLALGGDFMICADNAKFILAFVNIGLVPDTGATYLLTKSLGTARTMELAATGRPVSAEEAKELGLAYKVVAKEELDEATMKFARKLAAGPLLSYKNIKKQIYDAAYSDYKQWLAETEIPTQRECAASMDFQEGCKAFMEKRKAHFEGKMLSKVVSKEEALTKIHDGQTIMFGDWHGEFAADEIIDGMLEKGIKDIHAIAVSAGMPDQGVGKLIREKRVKSLVTTHIALNPLARDQMFAGELDIEFCPQGTWSERIRCGGAGLGGCLTPTGVGTEVENGKQKLTINGKEYLLEMPLHADVSLIKATKADTAGNLYFHLNSRATNSTMAFAGDFVIAEVEEIVEVGELGPEEIHVPAPIVDMVYVRTGEKRPLCPMWQRAKAKAEAKAKEKAEGGNKMAELTGRALIASRCAKFFKNGDFVNLGIGVPLMCVNYLPEGVELWLEAEIGTVGSGPSPSWDDVDIDCIDAGGQPASIIPGGSVYDNETSFMFIRGGHIDAAVLGTLQVDQEGSIANWTIPGKLVPGMGGAMDLCAGVKKIIVATDHCEKNGQSKILKKCTLPLTGYQCVTDIVTERCYFEVTPEGLVLREVAPGYTVEDILACTDADVIVPDEVGVMQMAYKIICYGDSNTYGACGFVGGRHHADIRWTGILQNSGLYDVVNLGENGREIPSDQWELNELTEILRREGDFDLLTVMLGTNDLLTMVRSGSARVAVRMEQFLTEFLQVQPMVCRPEQVLLIAPPSTALGEMAPSSTGLDEACRELGDYYADIAEKLHLHFVNASVWPVELGADGVHMTAKGHQIFAEELKKVLADIFMSEAAEITIKGLSDLAVGTYLLVDVRDAISFGYGAIPGAVSMPDIVEQAEAGKLAKDKKYILYCMKGMNSARLVPKLRELDYDAVSLSGGYSAWLMASFGGDDKQEEIEKSLRKGRFHKALFSKFAKAINTYDLIQPGDKIAVCISGGKDSMLMAKLFQELKRHNKFPFELVFLVMDPGYSEVNRKLIENNARIMGVPITVFESQIFEAVYDIQKSPCYLCARMRRGHLYNKAKELGCNKIALGHHYDDVIETILMGMLYGAQVQTMMPKLHSSNFEGMELIRPMYLIREEDIKQWRDLNGLHFIQCACRFTDTCSSCRPDGTSASKRMEIKQLISELKKVNPFVEGNIFKSVENVNLSTIIAYKQNGQVHHFLDTYNDKKEMKKYIKYAFSRTLPVLFGYIFLGIAFGIVLQQAGFNFIWAFCISLFLYAGSMQFVLVPLLASAASPLTVAVTTLFVNSRHVFYGLSFIESFKKMKTQLYMIFSLSDETYSVLCSCKNEDPEEKNRPAWFLINLFDQSYWIIGSVIGALLGQVLPFDFTGIDFSMTALFVVILLDQVLAHPKAAGRCAVTGLLAGIICLFIFGSGNFLLPALIITVLFVTAFAQAERRKELPMNTGHSILLIAIASGITFLIRAFPFLVFKKRQMPAFLKEIADKLPPAIIAVLVIYCLKGPLTVLGTETIAAIIAIAGVVILHLWKRNTLLSVAAGTVLYMIFIRCLPMKQYDVIIIGAGPGGIYSAWEMAMKKPELKIAVFEKGRELEKRKCPINGDTVKNCVGCPSCAIMSGFGGAGAFSDGKYNITNEFGGTLHEYIGKKKAMELMRYVDDINMSHGGEGTRMYSTGDTKFKKICIQNNLHLLDASVRHLGTDVNYIVLEQLFAELKDRVDFFFNCAVEHVTKEGEGYGVHTSHESYFCKQCIISVGRSGSKWMETVCQEMDIPTKSNRVDIGVRVELPAVVFSDLTDELYESKIVYRTEKFEDLVRTFCMNPKGAVVAENTNGIVTVNGHSYENPELQTENTNFALLVAKHFSEPFKDSNGYGESIARLSNMLGGGVIVQRFGDLIRGRRSTEKRIRESLVVPTLSATPGDLSLVLPKRILDGIIEMIYALDKIAPGTANADTLLYGVEVKFYNMEVSIDENLETRHKGLYIIGDGSGVTHSLSHASASGVFVARRIMEGIEMITSDDILSLNFYNYGNPFTGSYQGMRYRIIKQKEAKDEEGNILKEEGLLAVIWPEPFAYEKTQDALKTTQLFPFSEEGKAQVIEWLNASWEEGIYKNETIYLGVTGQKSASGSNVEQASGGTRWQVIPDGKGSYYIVPECSGTAAIDLTNGTVASGTNIRIWNYNLTEGQRWSLVKALANVQMHLEKAYKNFFRNPKIGFPKFKSKHRSRKSYTTNVVNGNIQVEDHRIKLPKLKWIRMNFDTFVSEELCPEDYQTLLPYFKMRYSHTCENILVSNFMWKDYYNTRYIRDAHGLIWIMDVDGQPGTMVPLCAPEDLKHYFEVAQAYFNECLGTKMILYLADKEAVDLLQLDTTRYDVKADRRYFDYVYDARKLMSFSGKAYHKKKNHVNAFMKNYDGRYEYRSLERDSKYHDEIMTFLKKWETERNIEDAYHRIDYELNGIDYLLTNCRYLDYKMGGIYIDGKLEAFSLGVYGKAERMAVIHVEKANPEIRGLYPFICQQFLLHEFPDALLVNREDDIGLEGLRKSKLSYNPIYLEEKYEIRQKMKSQLSLHERIRNANASQEVEKVKARHTYLHGRADATGEWADIWSRDPNCSWAHIFGRMRGFDQIWHGSVAQYDKMSFENAIELMEIYPETAGKDPRPLMEASVHTLVTDIIEVAEDGMSARGSFITPGVIHSTLTPDKKKYCNVLWERYGSDFVCEDGKWKYLHEQVCPDILSRMDCLNWAAEEYARITAPEEKEAPPVTLGEAPPVTDPGPLHLPYSVLGKPQNTVPWPEPYHTLDDENTYTSFVKPQEMANSRQYTDEELIQRVWDVEEIKKLIHKRVIYIANEMRKEELNDLWVQNPEHKKTASFGRNTGYYTGMDAIHDYYVVHHQKEREKQLKKLHAANPAIADIPQNLHIGCLSNHPVSTGLVELAGDGKTAKGLWYSIAQETEAQPDGTGRALWMPEKIAVDFVKEKDGWKIWHIVVSTDLVSEAGEDYSEQEVYHNYETNPVDVEFGTPTIAKLIHNTDFNWWDNYPPMPEAYETFSDAVSYGPEGYVKPALYGLDSKEGRNFRMGKTYSTEELVSRWEDQRYMKNLMGKYANCMILNKEHEMFERFWSKKREDLCLSFNDGAYKGEEAIKAYYEAEYRRNDLVAHLLQKRFPEKLGSLSDEELYGIGPFKVKPMSCPIIEIAEDHQTAKGLWYCQGAYNKVEGCGPVARWTWGYFAVDFTYEDDEWKIFNLMYVNDIDCICGQSWGKEEKPYPPLPEFQELADFKYPEYSVKKTIRPLYAPDRALTKAPEIPVPYRTFAETFSYGIMPRYDYLMKPLTVAGLTLKNRLLSAPTSMAELGPEEHYTDENFDYYRLRAAGGAALVTVGDVIVDNATGRSHPQQLGMDDPSVISSLKKMAEAIHAGGAAASVELDHGGALCDPAFLDGRHPIGPSALSEEEWGVAVDEMTEAQIYEVAEAFGRAAAMLKKCGFDMVMIHCGHGWLLHQFISTLTNRRTDQWGGSLENRMRFPLLVVKKVRQAVGRNFPIEIRISGSERVEGGYGIETGIEIAKMLDGKVDLIHVSAGTNTDWYSFVLMHPGIFQKEGENANLAAEIRKHVKTPVVSVGAFTDPDFMEAFLEKGGADAIALGRSLIADPFLPKKVMRHQTEDIRPCLRCGECQGGMMAHHCMRCTVNPLIGREKEVFHPVPVHHTGKIMIVGGGPAGMQAALTAVERGHQAVLYEARERLGGALKFADGVDFKASMKRYREFLIAQVEKSDVIVHTGVRVDEAIIREEAPDALILALGAKPLILPVPGIHNSNVLIGADLTEESVLGNQVVVIGGGLVGCEQALHIARDGHQVVILEMQEELATDCVVTHRENLMHQLNSCDRIQILTGARCTEITDTGVKVDRGGKEETITADTVVLAAGMKADSEQVNQLRTIIPQTYVIGDCNQAGKIMRAVRDAYDAVVDFGLFMLTSIPVSTAILVVSIVLFVVMCYKGVHTATAALIASAIMAFGTTDGWMTTMTTTWVTGVGTFASQFALAFMSAGIFSYLMRETKCGEAIGQTFIKYVGGDNAPFILAIVAAILQLAGIQTYIFIVAAMAFGLMKAANLPIYIGYAAVVAVPPIVSFTLPGVTAMPNVLPTSFLGTTTWAAPGLSIAISVLGILMAVFYLRYLIKQARRKGIGYTTDASKEYGASKEFGDIPTPPFWKAIVPIILVIALTSFFQLAMHIAAVNALIFGMWITAGVTAILHFDVVVHKITIPRALSQGTTEMFPFIMMSGCVFGFGLVAQKAACMDYLIQKIMSINVNPYLTAWLSVCLIAALCADGISGMTMWLGTFGAQFAAMPGVDPGALHRILVASSTTFDSLPHSPMLAQGMGVFKTDFKESYKYSFVLTVLFPVIFSLVGVVIAIIFYMNDYEALLHQAERLEALQEIRNLMGRYSYLHSAFRNKEYAELWAKREDDKLVMPFGKFVGWEAVRHCYVDLHGDRNNPDDIDELRGLMMIHLMNTEIIEVAADGKTAKGVWLSPGTETAPQPGKEKGAWCWGKYEVEFIKEDGTWKFWHMILYPLFLSPYDRSWGQPAPEKMLGQIQLEDPMCQPLDAPMWEYGPDAEYPYDEPTLPVPYDHYTGVMTEEKIREQLEHKLLKLEAQEACRNLMGRYSYYGTAFRNKETVELWAKREDAQLMTPWGSYDGHDGIKACYLEDIGDRSDTRVFEAIKGAVIIHEIDTEVIEVAEDLQTAKAAFLSQGNDTYVDRTENEKVHAKWVWEKYSVDFIMEDGEWKIWHMTIYPLFQSEFGEGWADNTEFVSNAFEFPNAKPEKTDWHYDRNELYPANEPAIPEPYKTYDKCSDEMSRTYEELKAGFERIEAAQACRNLMGKYSYLHTAMRNIDFMNLWANREDDILAMPWGYYLGIEGVRKCYLEDHGDRSDPQVQDSPIFKGGMMMHAMDTAVVEVAKDGKTAKGVWLSPGHESCYIPDFSKFPDWKKGDPLPENLEIMSSCEWAWSKYYVDFIKEDGEWKFWRLRLWPIYKNDFYVPWTQHPDMDEVDFPFHNHKALPESNWAWNKEIVYPADQPEPPAPYDHYEDAVPKLWKSFVMKGRKVKKEWNLRQIGNMALIVGVFAIFLVGICFVRFSKAYVNAFIGNYTGIEEMLATMKGGSNTDVAKRELLACQNDYDAWKEQHQGERVTLQTEDNIRLSGLLYDQGGKETVVYLHNIGSAAGEDFYYAPWYWEKGYNILMPDNRAHGESEGNCASYGVYEGKDVNQWLQLICEKYGEDSRIIVHGDTLGAAAALMASADYPEQVAFTVAESPVVNLYDAAEYMMKNQFSSIPLFLWIGDWYSYKEYGFHLKDVDLSDAVQESDTPLLILCGSKDTVVDPENAVSIQKASGADCQILGIEDGTHGLLYAKHSDEIEQSIDHFIGEYINNQQQLVVEMINDLMIKSFLALTDTLNFTNAAKRLYLSQQAVSKHIAKLEDELECQLFFRSRGDISLTPAGKIYFNVFSQYIDNMANATILVRNMTGTVKHKLIIGHLEMLDIRLTLSSVVQKLKQRYPDIELEYRSYRDYELPQALHDNRIDLAITLGPEIQPDLIIRTVPLTKIQDFLFCGKDHPLAKTATSYLDFKDENVFLQLPPSGDINQPLQRLKNYDFPVQNLRCIDTLSSTLTAIEMLDGVSFAVANSIFISNYVTFPSNVLVDLVAAYNVKNPHPELDDLLELIQQYHQESPVLMRKKEVSDVWMLEKTTTLDQLIIHEGAQIHTPDGKFVAMTINGSGTPITPGTYYGDIVLTVADTCHMPPHGLMKMMNRSEEFRCALVINNNEIVKEQSVNELIKGGLVTDRFADSVTIQSSEPSFNGILIKGNSRYQIKNAHLHLEGNGTNDFLGVGAGIAAIDNTHVRIDNCDITMAGVTRCAIHSGGDSIIEINDCQITNESPDAPKWMGDFSWGIGVTGSNRLVQLADNGTVYYNRCKMKTNGWGVFSIDGCDVCARIYVKDCDVDLSGPRANGYGAFCIGDRNIVRFDQSRVHVDGYALLVRGMMATARAEIINGCQITGNRFAVLCIGDNQTPVTLHDSSFITDQSTLVVKGSATCFDIRNCRMEPGNGVILQLMDNDEAGMDIGKVKVPDREDVYLEGRDLTKIDPENDVILNLSDMDIVGDFYNSTTNLHMEKEAEKGGVGNPDTFGGLFAPPEGVEGSFMDAEVPEGVDDPKKELEYDKELRGPKNLAVNLKNTRLEGAVSAASQSYREGLTWIDEKARLELSRIQQQPAPTINNGVVVTLDTDSTWIVTKTCYLTGLHIGKYSMIKAPEGQTLTLFVDGTETKINQSTDYTGKIVLKVQMNQYYPHLFEPFTIKKTTFRNHIFSAPNMMCHMDANGFPTDYMIAYYAEKAKGGAAVVTVGDTPVDHEHAPSNPRSFNLSYEALPFISELAMAIKSHGALASLELNHGGLYNPPEAMGGRNPIGPVSFVRSWDGVEVIGMDEAMMNTVADHFADAAELLKIAGFDMCLLHGGHGWLLDQFISPLFNTRTDEYGGPLENRAKFPLMVIDRVRERVGDDFLIEYRMSGSEEIEGGLTAEEAIEFAKMIDGKVDIIHVSAALDTEEAQAVHTHPTIFLPHGVNVHYAAEIKKHVKSPVVTIGSISDPEMAEQILAEGRADIIGMTRALIADPYWPEKARLGQSADINPCLRCLDCLTGMHTGQHFQCAVNPWTGREFRMRNYVQPAKEQKNVLIIGGGPGGMKAAITAASRGHKVTLAEKTDTLGGLLKFTDYDSLKVDLMRYKNHLIHMTQSMPIDIEYNTEVTSEYVANKQPDAIIIATGSTPITPRIPGIDLPSVKHATTVYTDLSIVGDSVVVIGGGLVGCETGLFLAELGKAVTIVEMQDEIAPEANWMHKEGMMQAFAKQNITTVTGRKVVSISEDGVTVADKNNETTVIASDSVVYAIGMRPNNHLVDELRDSAPFVRAVGDCVRARKVSPAIYEAYYAAVDLAMDRKTAEEFWTTYFGLIMHEGADTCMGNPFKEFIKEARIGTYDALTDDEYHVKYQQAEEISAFWNGRSKRSAGQVFAEALSRTPLSYNEQKEILSTLMDASERITYKSLNASVNEDGEMAFDMDPVQMKQSKENADCEDLDFETAYEETPFDEEEFRWTPRLIYDYIGEYVHGQYGARQAAAILVYNHLQGRRRNMILAGPTGCGKTEIWRSLSKKFDFIKIVNGPQLACDGWKGSYHIKDIFLEELQNGRNPGHLLVVIDEADKLFEPAVASGGTDFSKMIQNEFLKIMDGDSMIVGSDDPKKKSVTIDCSGVSFVFCGSFETLLQNRAIKPSPIGFSRGEAEIQSEPVLFTEEDLVQYGNVRREIAGRIQQIAEVDMLSEEDFEYMMTSRKKMSPIRQLEKMYGIHMKVDAVTRKYLAHKAVESKLGCRYIRSRLQVLLDDQMFDNPDQKEFQLSVEAAQTSDPEASEAISALASMKNLRAVCSSITGEVRKNNEDNYCFFSRFRPLEQEDTGFLVYSSESGEIRQLEYPETAEESALQSGIKTEGQWLGVFDGIGGLPDGEVASLIAASSLAEAKDDWTSENEAEYEEQLRKTVCQLNSDMLSWRKSHKVNQIGTTMAAMKFGRYAIYGVNSGDSRIYRMRDGRLTQLTKDHVFYYPGHLRPMLIGFLGTEQEDEPVRADIYQWDYCPGDKYLLCTDGVSGMIWDKELEEIMCLPVDEAMEALMAAVHRMGAADNATAIILEIKECKEYFGDGAAMQINNILDFDDEASAKAYNFTITAIKEFYDTIESDQFTAAGGDTIYAYLTKVMELVSFKEQLKRYIYEASGTRKPYSKMDYSAFMLAAFEKNDCMAGKSKSELKRQINRWLNAETIKRENLFLIGFGLDMDDKMLTKFLTLVLKESDFDFNDPKEVIFWHCRHTGKSYQAAMNMLETYEQLEQKEPVRADHRWQAFQTMPKMYLGMEDQLWVYLHYLKFLMIADRKTTKSREMFEKIYRRVQRACADYMNRYPDKFGQVTRWENINPARIESVLYSGVPVTEKGNLRSFTALKKQFKSKRLNRARMSELLAGKSMERFDLITLIFLLYALNEDKLGMYAGERFNEFVEQTNDLLAEAGMMSLYPVNPYEAFILMCIVSDDPLDTFAAIWEKSYEESESSVQMRKCRIGTAKFFTLLLLLYHTSIKRADIYSLGMVLYYLSNDRHLPFSDIIDADERMQKRVFGTARLPEPCRAFEGMRFVIAKACAYDPEERYQSAAQLRQALEKVSKAPYGYCPECGKKLLKKNGPYGNFLGCSGFRKNKPGACDFHSGIDKFLNHLNESRQGMLRQTNQQPITALYPRLSHEDELQGESNSISNQKRILETYAKQNGFSNLRWYTDDGYSGANFQRPGFQAMLADIEAGKVGTVIVKDMSRLGRNYLQVGMYTEMIFPQKGVRFIAINDGVDSAQGDNDFAPLRNIFNEWLVRDTSKKIKAVKRSKGMSGKPITSKPVYGYLMDEDENFIIDEEAAPVVKQIYNFCLAGNGPTKIARMLTEQQIPTPGTLEYRRTGSTRRYHPGYECKWATNTVVHILENREYTGCLVNFKTEKLSYKVKHSVENSPEKQVIFENHHEPIIDTQTWERVQELRKQRKRPNRYDEVGLFSGILFCADCGSVMYQQRYQTDKRKQDCYICGNYKKRTHDCTAHFIRTDLLTAGVLSNLRKVTSYAAKHEARFMKLLIEQNEDGGKRRNAAKKKELEAAEKRIAELSAIFKRLYEDSVTGRISDERFTELSADYEAEQRELKERAAAIQAELSKAQEATVNAEKFMNVVRRHTSFEELTPTLLREFVEKIVVHECSYDENKTRRQDIEIYYSFVGKVDLPEMTETKQTSTTKTDRRPDCVTEIRMGNSVLTVSGFFKQGATDTAADKMMKVLEAEAATQKTAIMRNGIEAMITDITATTAEAEDYTGEDGLLYCGKCHTPKEAYFSKETAQWLGHDRHPTECDCQRAAREKREAAESRQKHLETVEDLKRRGFTDPAMRNWTFEHDNGRNPQTATARFYVESWETMQAENIGYLFWGGVGTGKSYLAACIANALMEKEVAVCMTNFATILNDLAASFEGRNEYISRLCSYPLLILDDFGMERGTEYGLEQVYSVIDSRYRSGKPLIATTNLTLEELQHPQDTPHARIYDRLTSMCAPVRFTGSNFRKETAQEKLERLKQLMKQRKESLMADNRKYYYLKLKENFFDSDSIVLLEDMKDGILYSNILLKLYLKSLKNGGKLQLDEHIPYTAQMIATLTRHQIGTVERALEIFRQLGLVEQLDSGTFYMTDIELMIGQSSTEAERKRAARLENKALLPPRTKGGHLSDIRPPEIEIKKEIDIEIEKERELETGQAPARSYGRYNNVFLSDTELDELKAELPDKWEYYIDRLSTHIASKGTKYRSHAATIYKWAQEDEAKKPPKKGIPDYSCKEGESLMGAEYDNRPEALLAAMGTAPAEVVVCDTVAGGIPDFYLPQEKRPFQPPFLAHSWHGCAPFCRFRWCGGIGGNSVSSRYHFRGFSALMTLLATFKHISSKNADYGAAEAYLTFEHDEFTMKPTLDENGRLIPREDYRISSLNCGDGDFAVACMRANLRYEKNQKREDVKSHHYIISFDPRDGTDNGLTVDRAQELGEQFCKAHFPGHQALVCTHPDGHNHSGNIHVHIVINSLRIYEVPLLPYMDRPADTREGCKHRCTNAAMEYFKSEVMEMCHREGLYQIDLLNGSKERITEREYWAAKKGQLALDKENAVREAAGQPTKPTKFETDKAKLRRTIRQALSQAGSFDEFSSLLLREGVTVKESRGRLSYLTPDRTKPITARKLGDDFDKATVLALLTQNARRAAEKTTPIPEYPHTQKERLREEKAAKTTPADNTLQRMVDREAKRAEGKGVGYDRWAAKHNLKQMAATVTAYQQYGFSSPEELDEACSAAYAAMQESLTELKQVEKTLNGKKELQRQVLAYSKTRPVRDGLKQQKNTKAKAAYRQKHESDFIIADAAARYFRENGISKLPSYKALQAEIETLIKEKNSGYNDYRAKREEYRRLQTVKGNIDQILRRERKPVKKQEQERMRKRYNTPHRSRVVKTRMTEEEYAEFAERLSAYNMSQAEFIRQAITGATIRPIITVSPVNDELLAAVGKLTAEYGKIGGNLNQIARTLNEWHSPYPQLAGEVRAAVSDLAALKFEVLQKVGDAVGNIQTYQLMEQIINYRDIPTDKRIDILNALERIGFFPAYGGVKTMQQIMEKSVPGSGPQFYFVFRENELIGYNFLIGDTKKYKAFPWLAISNMDEQKLTVCEEMMKIQIAFFEKLGMQKIADHCVRIMEDYRKGIGKQKESDCRMSQLLPYETIVKASEGDPEAVAAVLSHYAGYIRFCAKMDGQINTDMQEHIVRQLIESLLKFHFDRMTEHEKYQEHIRHTHDAFCKTVIRHAAIDAARSIRSRRKREISLEYLIEEKHYPFSTTDKYFAEQSGMTSYPLFVCGQMVLLESPELAAALSALSQMEQEIIFLYYFQRLTHREIGRRYGRAGNTTGRRIQMILRRLRAELEGLSYEPATSLMSKQCDIVRDILPLYVDGACSEASAEMVKEHLNACTDCNAIYQKLLSHTNEDVLHEESESVIMRHEAKEKQRGKKKITIAVLVSIALCIIAIFAALFLLPINIAYEPVKIDFPFEVEDVESVEMYHYDGVPASAEKKVVVAENDIKTLYDKFKGLSLKDKTTEETAGAAVTSFRFNLSDGTSYDLIYACYGVKNGELKSAAGGFKYFTSADIGSYWNNLNTELEAIPINESELPMDYEKLYKAYYLQVYSYTISLAKNREIAEEITQNTFYKAVSTTSQFKGKSDELTWLCSIAKNLYHDEMRSRQRVADVSEINDLPSNENVENSVADSDMAFRIHLVLHRLEEPYKEVFQLRVFGELSFSQIAAIFGKTESWARVTYHRAKLKIQERMDEKHEMLERSEEQFPELPMQWRDHGYEIDQRLGKGAYGAVYRLVKNRGAENEEFSALKVISWELGTEQIREYDNDLEKARRNFSRLFNKAVNEVSILESLAGEAHIVQLKGSCIEKMPEENYCRLYIQMEYLTDLLSFMDQEGPLDETEVIRLGIELCRALEVCHRQGILHRDIKPGNILVSKDGEFKLGDFGVAREWVDASMTIVGTRSYLAPEAVKFMPYDNAHVRMNYADLFNTIFAKDHLVQELGYFFVNEPSVAEFLGKVGVEEAQVQQNIWELRFSNFDESFVLNIYFEGADGQYEPQIRIESLVLRGRTKGQGLSKKILNFLVDYCAANQPTTLWLVNVINREWKMYLISQGARLIQEEGGNNGAVLSIPGKIGLKKRRRYNDEFDRELMNYLIQFLRLEGVEVRDIRSRQSSETVYDIRVDIDGFALMFQYEKAGNAGEAQIRFELRMRQPEVQNIPVGMLVNMLNVLLLYCRVHGTMTLWMFNGQVFGNDFVKYFVQRGAKVMQEDPSGLRGGTVLTFDCMLRMIAVVLFIYSIYEMLKFLFFATLGDIVTTIKGNYDSPERDQAVKRDLWMAAKSIIAFVIACCLLVMQKPLNDSGVLKDLINKKNTYFEIDSKCQNSSMLPKVKEKLPANSLLQKGTWAYVGSPSKASERYFYWTSVDTNKVGAGQKIPVVISTADGNYYVSESTTANRTGSGSPYVAISDHLTQVDYKKIIADGQEYNTLQEAYDAYEKELTDGKYKQYKNTLQMHIDKNKNKGFTFVELVIVVAILAILVGILAPAYSKYVERSAESTDLENVRTAYGEVMIAAEIEEEKDVLKVVPLKQKKQDGSHQIQCQLPESLIPMAIRIPIIGKVILLPVVYVKYPTILRKAYYLTGKVKMKTAVRSTFLISPRICKNRMGTYGYISIIAMLCYGFMLLMFLAAKRNKIINSFLVVLLGLLFWTGGSAFMRAQFWPGCEFWFQVSLLGILLLPYAYCRFILAFGGKKNGAPGKIYLAVMLLCFWLNVQYGIFLESPNVVDKNGISTFVYEIKPAIVVFFIPAGIFLLYLFRVLVRICNENPNIKVQYEPVMLGVLALFLGNAFLGIPLFSGFPIDILSGVVNVFLLFYALIRRRLFRLQMLASTSLCYGVGFLFSILVFLNIVPSLQKIFHIQLDKNMTVYTLIFSIVFLVIYTFFTFLWRFLIRSVFIREENHQAEKIREFNSAISKTLDLQEILDRTIRVMKELMDVGNIYICMQNEPGEPYRGVASDQPLSDLAFALDEENPMIQWLKEHEEPIVYKDFRYSVEYKSMWEEEKHQLDKHHTRYCVGLKDGDNLVGVVLITDSSAKKRVVYDEVELISNITSVASIAIKNARLYENACLEARTDEMTGLLNRKYFYEVLNEEFEKNKEASLALAIINVDDFKLYNQLYGVKEGDLCLQRIAGIIKSSVGDSGYTARYGGKEFAVLLPRYDLFSARNLVESISKQIFVMNNRRTDMKLKAITVSAGISAAPYAAKNVKELMENVDLAVYHVKHSGKNGIQVFDTMFRNNKNENTTNREHIYREYESTIYALTAAIDAKDHYTFSHSTNVAYYATALATTLGMNEDMVEIIRQAALLHDVGKIGIPEYILNKAERLTDEEYETIKGHVEASIDIIRHLPSLDYVIPAVIGHHERYDGKGYPRRIAGEDIPLTARILCVADSFDAMTSKRCYKKAFPLDVAREKLLQDAGKQFDPNLVVKFVECLDNGTISLVKAETDENMPYMNLEEKLKKQQYKEIWQQYCGFLDLSMDGYMKIQRRLMEEQIRLWSNCGLGQSILKGKYPKNLDEFRKMVPLTTYEDYADVLLTKQPDMLPGNPVIWIQTTWEGGKHPIKVAPYTRSMLDTYRNNVTACLILSTSKEKGSFDVAATDKFLYALAPLPFATGLFPLALGEEINIEFLPAVKDAVNMSFSERNKLGFKMAMKKDLGFFFGLGSVAYAVSLSLSSMTSGGGGIKLSELMKCKAHMILRLLQAKHRCKKENRPLLPKDLFHLKGFMVAGTDNLCYKDDLEALWGIRPMELFAGTEPSIMGTETWTRKGMYFFPDTAFYEFITEKDMMKNHEDPSYIPPTYLMDEVRPGEKYELVFTILKGGAFARYRCGDMYRCVGLENRDDETRIPRFEYVDRVPWIIDIAGFTRISENGIRSVIGLSKLPITNWVATKEYNEHNRPYLHMYVELERDAMLNTAMSATILKDLLSTYFKYIDQDYRDLKKILGMDPLQVTIFTCGTFAAYEKKTGKKIHQMSPSHYDLKELLDVQECLNKVRMWQIVLGSFGFLLYFIYDINSIRKKNVIFQKFFAVGTVFVVVSLLMELLFLWGQCQHRIGRMIGFGTGAVGFFALLIYTLFFALPFEETYCEDNKLRAAYTEGMYGVCRHPGVLWFAGAYLCMWGMFGGWKQGIYFLLMIFWNYLYIIFQDLWTFPQTFFNYKEYQKNTPFLIPNRDSIRVCLYNIRKQMIVRKILQQLKVAGLIEVARGTGGVTILRMRDYIITISGVFFVCHNQCKTFKGSCNMLLIVFAWALVNLEAVLRFIGKVLALFNPFLIGGGLGAFLILLAEPGKTLWFILFLLILQQVEGNLIYPKVVGLKQTIDCIYIRFLITVMNGYFCVLTIIDFFILCFMCILTYLSESLSRKQKRGFLLAFVLIAGISILEVITLVVDGLPPAYRWLNVASNYMGFGLSPAVCICLVYVLDRKTVFRRKIRTAILFEIGYLIFLFVTIPYGIVFSVSADNIYSRGPHFYIYIIMYFGAILYLSVSTIINAREFQNRSKLLIYPLFLFVMAETIIQVVLPKLHVTWLCITLLSVLYFIYCNEMWNQLDALTGLLNQNSYLRKTGGMGCKASVLVVFDVDDFKQINDSYGHVQGDLCLAEIAECIKKAYANFGYCYRIGGDEFCVLLKNADKEDWCKQEFLHRLEEKRRKITFLPTVSYGSASFSCGDIVAVKEKADRDMYQYKYERKNRNGMVMKQMTIKKKITLWYTGIIAVVLGTILVLVLLFVDRVGISATEEEISAAVTGFSSNINFQDDSFYLDGDTEFYDNGIMFCIYDKNGRLLYGTIPAQFPEETILMSNTPRTISESNRKWMVYDSVYTYGDDDEMWVRGITSVHSIELFMQTSEKMLLIVFPLLIILIGAIGYFMIKQALRQVDLICDEVENISNGKDLSKRLSLPKAKDELYELSKKFNEMFERLEFSFEKERQFTSDVSHELRTPVAVIISQCEYLLENENLSAEDKEEIAVILRQAKRMSKLTSEMLMIARNEQDEQHLMEKLDFGLLSELVIEELQTKAQEKNIEITLQKQDDLFMNGDQTLILRMMMNLITNAINYGKTNGHIHVILKVENDQIVGEVKDDGIGISEEHLDKIWERFYRIDKSRSRENGGTGLGLSMVRWIVNLHNGTIHVESIEGIGTSFIFRFPKIMRLLIVEDENDLRNIVKKRLVKEHYSVDACGDGLEAMDYIDMTSYDGIILDIMLPGKDGYEILRELRQREDDTPVLLLTAKDSIEDRVKGLDLGADDYLIKPFAFEELLARIRVMMRRKPQFTSNQLKIADLILDRDTRKVTRAGNEIDLSAKEFMVLECLMRNKNIVMTRQQIEQNAWDFDFEGGSNVIDVYIRYLRKKIDAQYEQKLIHTVRGVGYVMRENEMKKILVVLLSLTLIFAFTGCTSSNNGAAEDIEIKTQEVVTSNTDDNDDNISNTENTVENANEKDYDFSSYENDIRNITKSVNNAKTSTNASENHEQFYALKKQIDAVDDELDKLDDEFEYAYQMKEISFEIYKARERAIEKLEDELELAEEALENKYGIDDMILAFEENEENILNRILSCISKEADVLKHEVIHKEELSFKGLYIDKYKRIVVREDTERVGEAFKDGLKLKKMKKILSTRVLVKIGVLTTILLVLIICTVWGNSALMVSTVNISSDRIPSAFSNFQIAQVSDLHNAEFGESNTELIELLSEHEPDIIVITGDLIDAGHTDIEIAFDFVKKAVQIAPVYFVTGNHEANFSHYDQFKTGLEASGVTVLEDEAIQLVHNNEMITLIGLSDPDFTIKGDMFNEVPAMVNTKLNSLIDDENSYTILLSHRPELFETYVCCGVDLVLCGHAHGGQFRLPFIGGLVAPNQGLFPKYDSGLYTDRITNMVVSRGLGNSIIPFRFNNRPEVVLVELNVEMKRYLDLVPISVKIHRKQSRMSIFCIVLAVFLVTTIFGMADMFVRSQILQTQQEYGNWHIAIKNISNEEASIIASRPDVKVFSPYGVLNYRGDLGYTLGGKNVAICGCDKSYITEIWAGQLEDGVFPQASNEALVTENVKQIMGVAIGDSIAVETPDGDKLNFTISGFMNNTDSIMSGDSYGIILNTEDYCAIYPNVSDGEPNDYGIMFFAQFANTRNIQEKIANLKEQCSLSDEQVSSNNSLLGLLGQSRNPFLMSVYAAVAILFVLVLLAGIMMITSSLNSNVAQRTEFFGLMRCIGATPKQIMRLVRKEALLWCRLAIPIGIFSGVVVIWVLCAVLRFLGPEYFEAMPTFGLSIPSILAGIVVGLLTVLLAAYSPAKKAAKVSPLAAVSGSANTLKPARNAANTKLFKIDTALGIHHAKASRKNLLLMTSSFALSIILFLSFSVTVEFMQHTLTPLHPWTADLSIISPDNSCAIDKTFLEDLKENSIVDLVYGRMFAYEVPSVTNGIEKKVDLISYEQHQFDWAKDYLLEGSLESAQNDVGTGLIVYEQQNTIQIGDTVTLNISGQKKEIQIVGTLSDCPFYSAAGVGTIICSEDTFKQITGESKYTIIDVQLTKEATDEDVYAIHQMVDSTFTFSDERMGNSSTMGTYYCFWLFVYGFLVLIALITVFNIINSIAMSVSSRSKQYGAFRAIGLSTGQIRKMIVAEAFTYTIIGGIVGTILGLLSNKVLFEMLISYKWGDTWTIPLKELGIILLIVVLSAIVAVYGPIKRIHNMSIVDTISAQMEILKVHDLCKTYGKGEAEVEALKKVSFSLDKGEFAAIVGESGSGKSTLLNCIGALDAPSSGKILVDGQDLFSMKEEQRTIFRRRNIGFIFQSFQLVSELNVEQNIMFPLLLDYRKPDLTAVEEILELLGLTERRYHLPNQLSGGQQQRVAIGRALITKPKLILADEPTGNLDSKNSQDVIDLLTQASRRYQQTILMITHNNNLTASVDRVFRVSDGVLTDLGGKTNEALSMRICRDKQIRGFFLFLTFFAVLLFGLGIIFGISQINDIKTLYLTHDEAVASSLLEQGIPKDVIAVALTNTEISEDGQILLAAAGIGADVENNMLPFVNQFQQSTFYTMLGMEIFLLLILATGILLFFWKRNCLYQQAAKVLTNYINGDYSCHLPQNHEGAIFQIFSSVEQLATMLQSKSETEHKTKEFLKDSISDISHQLKTPLAALAMYQEIIENEPENADTVKQFAAKMGTSLKRMEQLILSMLKITRLDTGNIVFEKKSCYVAELIAHSVNELTTRAKNENKEILVDGDREQLLVCDMEWTSEAIGNIVKNALDHTQSGGTVHITWEHTPAMLRIFISDNGNGIAPEDIHHIFKRFYRSKHSLDTQGIGLGLPLAKSIVEGQGGIISVQSEINTGTIFTISFLTESMSKILLLEDDISLVDGLKYSLKKNGFDVEVARTVCEAIKYLAEISKYDLLILDVTLPDGTGFEVCEKVRKQNQQIPIIFLTASDEEVNIIRGLDSGGDDYVTKPFKLGELCSRIRALLRRAGVSNVEKSVSIECGDITIDLLGNRVSMKDRILDLTSAEYRLLCLLVRNANRVITRDIILNELWDDTGNFVDDNTLSVYVRRLREKVEADPSHPEHLITVRGFGYQWKEVSVMDYMTLKEAGEKWGVTPRWINYYCSAGRIPGAVKMGTVWLIPKSAQKPVDGRTKQGKEQKHEMAMNNSLAEVHPELVSEWSEKNLPLKPDEVNAKSRKNVWWRCSKCGNEWKSVINARVKGTVCPVCAEREVLAGYNDLATTDSQLLSEWDYEKNKWKPTEVSRTSAKRVWWKCRHGHSLVRFLFAISLTPSNFGYKKLLMNAMDVALICKALGDANRLEIVQMLSDGEKCGCKLLERFEITQPTLSNDECSGNIVANSYLSCCICLKFKKYLMSLPHLPTSANFHQDIILHIQEEHQWRVRLMHSLILMWFLSPFQLPNSQCGAYSQQRYKHQYCCAWDCILQILFSSYQISLSLNQSFVAKIRSISISSPCHFYFVLYCFIGFSWSPLPLFVPLRSVQSQRPLDVVNRSAQSRCPPDILWSSLRYGRCKADIHRMSCTLVFSRIRVHKSIWEDITMTADGKKTAAVVLAAGSGKRMGTSVHKQYLLIKGKPVIYYTLRAFELSEVDEIILVTGADEIDYCSREIVEKYNFQKVRAVIAGGKERYDSVYEGLKALSDCDYVLIHDGARPLISSVLINANISCVQEKEACITAVPAKDTIKVVDNKGYVADTLERSKLWQIQTPQTFSYALVSEAYRKRAEAGDTTVTDDAMVVEKYADHSIYLLKGDYRNIKITTPEDLVIAEAFLNGGDNRMDKDVLILAIESSCDETAAAVVKNGRDVLSNIIYSQIELHKLYGGVVPEIASRKHIEKINPVITAALDEANVTLEDIDAIAVTYGPGLVGALLVGVAEAKAISYAANKPLVPVHHIEGHISANYIENKDLEPPFLCMVVSGGHTHLVLVKDYGQYEIVGRTHDDAAGEAFDKVARAIGLGYPGGPKVDKLAKEGNSDAITFPKAHIQGAPLDFSFSGVKSAVLNYLNECHMKNIEVNRADVAASFQKAIVDVIVEHTMKAAKEYHIKKVALAGGVASNSALRGAMEEACSRRNIQFYRPSPLLCTDNAAMIGAAGYYDYMNGKRAGLDLNAVPNLKIGEKAMLDLCLLGTGGMMPLPYRWLTSLMLRYNGSSLLIDCGEGTQIAIREKGWSFRPLDIICITHFHGDHISGLPGILLAMSNSDRTEPLTMIGPKGLERVVKALRVIAPELPFEIKFIELTEPQQQIRLHGYVIDAFKVNHRVACYGYSISIERAGMFDVEKARQNEVPIPLWSKLQKGETIRTEDGRIYQPEMVLGPARKGLKVTYTTDTRPTDSIVRNARGSDLFICEGMYGEKGDVNNAVKYKHMTFEEAGRLAKQAGVKELWLTHYSPALNRPEQYIEDVRQIFQNAYPGKDKKSLELNFEESMKKYDEISKKEVYICNCCGQMIASVDECDRAAFLDVSKAWGYFSKWDGCIHRFQLCENCYGKMIQTWCYLPDEEEQTEWIMKIRKMQLDDLPQVAAIEQSLFGDAWSEKAFRDTLEQEEADFIVAVNAQNEIIGYCGAYRALDEAEIVNVAIKKDHQNHGYGAEMVQALIGEEKKNGVVSFILEVRPSNLSAHRCYQKLGFRTIGIRRDFYDCPKENALVMKMESIAGDEMKILVLESSGLVASVAVVTEEKLIGEYTTNFKKTHSQTLLPMMDTLLKMIGIPVQEMDAIAVSGGPGSFTGLRIGSATAKGLGLALSIPIISVPTVDAIAYNLCGTDAVVCPLMDARRNQTYTGLYTFDGDQMKCISGQKAVMLGEIIDEINQLGRKVIFLGDGVPVFKPYIEEHIQVPHSYAPIHLSQQRAGALGALALQYYHEGKYESAAEHQPDYLRLSQAERELAAKKGQKKAMKIETFSAEETYKIGEQMGREAKAGDVLCLLGDLGVGKTVFTQGFAAGLGITEPVSSPTFTIVQTYDEGRIPFYHFDVYRIGDVEEMEEIGFDEYIFGEGVCLIEWANLIEEILPPHYQTVRIEKVLEKGFDYRMITIEAEGELQMDEIKFKIALKVNDLYYFMMHHYYSKPAGIIGLVLSIGSLVLLITRWNVTDATAKMLYFIIALLFTVINPLMLLTKAKAQIQRNKSLGGGLEYILSDEHLSVCLGEERADVGWDQIIRVKDNGRELLVYMTAARAYIWPKDQLGEQYARVVACLKQHIDTGKLKLKMIDIEAKLSSELGVEKWQVTAAVQLIDEDNTIPFIARYRKEKTGALNDEVLRKLYERLIYLRNLEDKKQQVIATIRDQGKMTDALLKQIEEAQTQVVVDDLYRPYRPKRRTRAMIAKEKGLEKLAVAVMAQNLGHPVEEEAADYVSEEKGVADVKEALEGASDILAESIADTAAYRMWIRQQFEKEGRLVSEAKDDKEKSVYEMYYHFAEPVSKIAGHRVLAINRAEKEKMVNVTIEVPEEKLIGWLKRQVVHQKNPYTTEMMEAAAEDSYRRLIAPAVEREVRNALTEKAEEGAMTVFGKNLKQLLMQPPIKGQTVLGWDPAFRTGCKLAVVDPTGKVLDTVVIYPTEPQKKIDQAKEVLRKLVREYGITLISLGNGTASRESEQVIVDFLKEIPEKVAYVIVSEAGASVYSASKLATEEFPNFDVGQRSAASIARRLQDPLAELVKIDPKAIGVGQYQHDMNQKKLSEVLSGTVEDCVNKVGVDLNTASASLLEYISGISKTVAKNIVAYREENGRFDNRKQLLKVPKLGPKAYEQCAGFLRISDGSQPLDNTGVHPESYEAVEKLLSELGVEPDKLREGSLPIRIEDYEKMAAKLSIGEITLHDIVHELRRPGRDPREDMPKPVLRTDVLEMKDLKPGMILKGTVRNVIDFGVFVDIGVHQDGLVHISQLTNKKFVRHPMEIVSVGDVVEVKVMSVDLAKKRIQLTMILDMNIAVLGYGTVGSGVVEVLTTNRETITKRAGEAIDVKYVLDLRDFPGDPIQEKIVHDYQVILDDPEIKIIVEVMGGVEPAYTFVKKALQVGKSVSTSNKELVAKHGAELLALANEKNVNFLFEASVGGGIPIIRPLNQSLTADEIDEITGILNGTTNYMLTKMDTAGADYDTVLKEAQDRGYAERHPEADVEGYDACRKIAILTSLAYGMQVDYEDIHTEGITHITETDFKYAKAMNMGIKLLGTSRREEGGLFALVAPMMIAHDHPLYSVNDVFNAILVKGNALGDVMFYGKGAGKLPTASAVVSDVVDEVKHMGTHIMTIWQPQKLHLVEYTLYKSRFFVRAKNGTEDKARALFGDIAICHAEGVDGEYGFVTEPMTVGDFEEKKSQLGGFIARIFMNMDKSGKYYIVKERALPEVLLKVVEAKRLIDSEKAMTVQEATDATGISRSSFYKYKDDIIPFHENVHGRTITLSIQLDDEPGLLSGILGKIADYRANILTIHQAIPINGVASLTLSIDVLPTTGDFSALVERLNAMKGIHDIKILGREMEEPGFWDNADKANNSMKELKNLKDTVEEYHRLETAWEDVETLLEMGYEENDASLIPEVQEAMADFEKRFEHLRIKTLLSEEYDGDNAIVTLHAGAGGTEACDWVSMLFRMYTRWAEKHGFTTTVLDYLDGEEAGIKSVTVEIAGENAYGYMKSEKGIHRLVRISPFNAAGKRQTSFASCDVMPDIEEDLDIEINEDDLRIDTYRSSGAGGQHINKTSSAIRITHLPTNIVVQCQNERSQHMNKDKAMQMLKAKLYLLKQQENQEKLSGIRGEVKDNAWGSQIRSYVMQPYKLVKDHRTGAESSNVDAVMDGDIDLFINAYLKWNNLLKNQPQEQMGIFSKIMGTHSERELKRVYPIVDKIEAMGPAMEKLSDEELRAKTDEFKKRLSEGETLDDLLVEAYAVVREAATRVLGMRHYRVQLIGGVILHQGRIAEMKTGEGKTLVSTLPAYLNALEGKGVHIVTVNDYLANRDAEWMGEVHRFLGLSVGVILNSMNPDERRAAYQCDITYATNNELGFDYLRDNMAVYEKQLVQRELNYAIIDEVDSVLIDEARTPLIISGQSGKSTALYNTCDYLAKRMTKGERKGEINKMTVMMGEEVEETGDFIVNEKEKHVVLTEQGVKKVEEYFHLNNLADADNLEIQHVMTLALRANYLMFRDKNYVVKDGEVLIVDEFTGRIMPGRRYSDGLHQAIEAKEGVEVKRESRTLATITLQNFFNKYNKTAGMTGTALTEEEEFREIYGLDVIEIPPNKKVIRVDHDDLVFGTHREKINAIVEEIIETHQKGQPVLVGTITIEGSEEISNRLRKEGIPHTVLNAKFHEKEAEIVAHAGERGAVTIATNMAGRGTDIKLGDGVAELGGLKIIGTERHESRRIDNQLRGRAGRQGDPGDTRFFISLEDDLMRLFGSDKMMKVFNALSHEDGMAIEHKMLSNAVEKAQKKIESNNFAIRKNLLEYDQVNNEQRELIYEERRRVLKGESMHDEIVRMIGDVVKAEINDVIDEGQTPAEWNLLLLNRTLLPIAPIKPLSMNKDDYKGYTRERLIDEVTEQVKELYAKKEQEITEETGSAETFREVERVFLLKVIDNKWMSHIDDMDQLRQSISLQAYAQKDPVVEYRYAGIEMFEEMIAAISKDIVMIMLHIRKKPEVERKQEVKVTGTNKDDSGPKKPVQRKNKKVQPNDPCPCGKCYPDGRPIKYKNCCGRNQMRYIISGRNITVTEGLKEAIYDKLGKLEKYFTPETEIIVTLSVEKQRQKIEVTVPVKGHTIRAEQSSDNMYVSIDLVEEIIVRQLRKYKTRIANQQNSRKNFQPAYLEMETDGDEEVKIVRTKKFAIKPLDPEEACVEMELLGHSFFVFRNAQTNEVNVVYKRKGNTYGLIEPENMVNHRYKRAVLGITTALVVSACTVPAMAAPITINTDQSISVVSTDSTYVGGLDLEARIITTVEQDQRSPYAKKGIAVADDYLKIHTEPNGDAEVVGKLYSGSGCEIEEVKDGWAHITSGDCDGYVEAKYLLTGTDAEAYAEEHKVSELVAKSQSEQMYMYEEPSADAKIVTTVLWDQELTVLGASDDGQWVQVKVGDNTGYIPADSVVLDVKYEEAVSVDEEQTKKESETAETEAETKAAETEASETEAETEKETEAETKAAETETAETKAAEPEKTQQDKESSASYTDVNETVWATYSVSIRSAASTDADKLDVLVGSYSITRTGVGNNGWSKVDYNGQTGYIKSEYLTTTKPAAASDSTQQTTETKQETKETVYATAGVNIRAKASADADVIGTLIAGYSITRTSDSNGWSKVDYNGQTGYIKSDYLTTTKPQVTESNQTSSSSNTSSSKSDIEEVKETVYATAGVNIRAKASADADKIGTLAAGGSITRTGKTSSGWSRVDYNGQTGYIKSDYLTTTKPTVTSNTTASSTSSSSSLGQQIADFAVQYVGYPYVYGGNSLTNGVDCSGFTQQVYLHFGYSIPRRASIQATVGTSVAISDLQPGDLVFYGDSEGVGHVVIYIGNGKVVHASTPSKGIIISDLYYRTPMCAKRIIMIELGKKQVLTIKRVKTFGVYLGCEGEEQAVLLPSKYVPEGSQIGDEIEVFIYRDSQDRLVATTLEPKLKLGETAILEVKEVGKIGAFLDWGLEKDLFLPFKEQTWRPESGQSCLVALYIDKSRRLCATMKVYEYLRTDSDYQKNDYVEGIVYQINEHYGAFVAVDGTYHGMIPSKGVHGRMKVGDRVHARVVKVREDGKMELTMSETVSVQMDKDGEKILRLLDSYDGVLPFTEKASPEVIERELGISKAAFKRAVGRLLKQQKIMIQGGKIRRIGMYTHDRRVTYSEISMKGFADIAQIAEYFQDCSVFQSEVLGMGLTYMNEHHLAWLLASWQIDVDTYPEMGCKVSVSTWPYKFDAAFGYRNFMLQDENGRRLAVANSQWILVDMENGHVVRIAPEIAAHYPMEEQADMSYAPRKIAFREEKERLEPISVPKAFIDTNQHMNNAQYIRTALEFVPEDFHIRQVRVEYKKAAVLHDQLYPFIYKDDQIIKILLGDAEGQAYAVVEFKRMPSEVERLSGWNICREAFMAKHRKLRKNNDPQLIMSGASGAAGTMERNIRLLIEYDGSRYDGWQRLGKGHGVSIQGKLEDVLSKMTGEQVELIGAGRTDAGVHAYEQVANFHTNSNMKCWEMKYYLNRYLPGDIAVNRVDDVPERFHSRYNAKAKKYLYRIAIGDVPCVFDRKYTWYCFDKLDVTAMKKAAALLVGEHDFKAFCSNKRTNKSTVREIYDIDIYADTRELQITVYGNGFLYNMVRIIVGTLIEVGKGERRPEEMTAILESRDRTKAGATAAAQGLFLQEVEYMDKELLKIENLTIGFPTKSGIHTVVDHVNLEVGKGEIVGIVGESGSGKSMTSLAVMGLLSEEAQVSEGSIQLNGQELLGMSREERRKIQGKNMSMVFQEPMTSLNPVMKIGTQVGESLKLHTDLDKEAIRGRVIEALASVGLRNPELLVDQYPHEISGGMRQRVMIAMAIINHPDLIIADEPTTALDVTVQAQILNLLKKIHRDMGSSILFISHDLNVIKEVCQKVVVMYKGVIVERGDAKEVLKHPKHEYTRKLVASMPDQVRKSQNTKKLLEVQDLNVYYKENKKLFSSKDKRKHIIHDMSFDLYEGEILGVVGESGCGKSTLAKTIVGLNREYDGKLEMDHLKPQMVFQDPFSSLNPARKIGWILEEPLKLKGIKDKKQRKELVNQMLTEIGLDPSFANRYARELSGGQRQRISIGLSLMRGEKLIIADEPVSALDVTVQSQILRLLLKLHDEKNLTYMFISHDLNVVHHMCHRVIVMYLGRIVEMADVDELYDHPCHPYTRMLFDSILTDEEKETTDSVTVNEILPETVDGDGGCPFYGRCRYAGENCLREVPTLTDIGTPGHPHLVRCERIAYGEKYTAADMKKHNYSLIFGLILTGIILVITIIGQFWMPYDITGMNSMARNQAPSLMHIMGTDNFGRDVFSRVMNGCGTTFFVALSTVVIGCFFGVIIGALTGFYGGLLDEIVMRINDVLLSFPSVLLVLIFISFIGTGKYKIIVALGVMFIPSFARIVRSEVIRYKSQEFVRSAQVMGAGSLRIIFVHILPNTVVSMLTAAAIGFNNAVLAEASMSYLGLGVQPPDPSLGRMLSEAQAYIFTAPWYAIWPGVVIVLIILGFSQISEGLRAISDMKYFIKKIITLIITLLFISLLTFTAFSVIPGDAAVSKLGVDASPEAIARVRAEYELDQPVLTRYVHWLGKALHGDFGQSYKYDTMTVTQLLQSRLPVTILLAVMSFIIIIVVSLPLGMLSARYAGKWLDVVINQVTQITMAIPSFFLGIILTVIFGLVLKVFQPGGYVSMQEDLKGCIEYLILPAVAVALPKIAMVVKYLRNSVLSEMKKDYVRTAYSKGNSVNQVLYGHVLRNALIPVITFVAMVVAEILAGSLVIEQVFSIPGMGRLMITSISTRDYPVVQAAVLYITSIVVIINFLVDILYQLADPRVRTAMKKKSVTKILLSVMVLLVSVAFCACGSNKSTESSETGNSSSEKTTESAADGTQSDAANSDTSCFTVGLSQEISSLDPHEDSDAGTRSVLFNVFEGLVKPTTDGDVTPAVASDYTISDDAKTYTFTLRDGITFQDGNPVTVEDIKYSLERSAEMDGESSALSAISAINIVDDKTIELTLSEANSEFIYNLSVAILEQANDANQATNPIGTGPFKITNFAEGQYLEMERYDGYWNKELDCIQHAKFKFIADAQSAFVELQGGTIDMLQYLTNDQVAALGTENYNIVESTMMLVHGLFLNNAYEPLKDVRVRQALNYAVDRDAINEFLFGGKSKIIQTHGYPTITAWYNADTEGTYTYDVDKAKELLAEAGYADGFDLEITVPSSYTQHVQTAEIIAEQLAAVGVNVTINQVEWSSWVSDVYQGRDYQSTVIGFDISSLSPATWYKRYYTDSSNDFTNFSDASYDEVYGKALATIDHDEKHQLYGELQQILTDQAASVFIEDPADFIAVSNKYTGYQSYPVSAIDLSLVKPVQMRNAINKDFFREIKYTLNRYVSILLIVALGVAFLAGIRATCPDMKLTLDHYLDEADYMDLRVLSTLGLTGEDLTAIAEVDGVKEVDGAHSYDAFVMNGNEKWTLRFLSEPVSVNKLEITEGRDIENANECVVDHLLIEKDGYHIGDQITVVPPGKGEKLSDTLTESTFTIVGVAASPEYFTTTRDTTSVGTGQTDAFVFLSPEVFKSDIYSAVYITVDGAAAKQAYSDDYEAVVDKVKAKLEAISSERESARYNGIMDDANTEIDDARDKLADAKAEAESELDEAWAQIQDGEQQISDGQKELDDNRAVYEDQIAAAKAKLSSGEQELQDGQAEITSNEQKLQDGQTQITAARQQLEDSSQTLAEKKQQYEAGLQAANAGQEQLTAGQAKLTEALETLQSQEAALNEQKASLQEQKENLTAQQTELEQGIAQLEAQEEALEEQRNEAASQEEPDEALIAQLDAQITAVQEQLTQLDAQKNALAEGISQVDGGLDQIEAGLSQIASGKEELNEQQKELNSQQAKLDETFNQLTEAKIQLDEGSSQLESGRQQLESKQQELDSGKAALDQAKAQLQSGQAEIDKGKAELKSQMASAEAQFAEAEQKLTDAKSELADAKEKYASGKKEAQEKIADAEKEIQDAEDQLADVDYPEWYVLDRNSTQAYVEYEQNAERIGAIGKIFPLIFFLVAALVSLTTMTRMVESQRTEIGTLKALGYSNWAIARKYVFYALSASLIGSLIGLVLGQKLLPWVIIAAYRVLYPNLFVVLTPLNAYYSIMASGAAVICVTGAALASCYRELVASPAELMRPSAPAAGRKILLEHVGFIWHHMKFTSKVAVRNLFRYKKRFFMTIFGIGGCTALVVFAFGLTDSISGVAHRQYDELFHYDMTLTLDDNADEADMDELYDFLSHNNDLKADQYTRLRSMSMSVKGNGETSYTAYLTVPEDTEVYKDFVVLQDRKTGTPYAMDDETVIITEKLANLLRVSTGDKITVTDNDVDKEVTVGHIAENYLMSYVYMSPALYETTFGETPKWNKIEAFIPGLTSENSESYSAKLLALNAVSGTSTTDYVRSKFEEVLNSLNIVTLILMTAAGMLAFIVLYNLNNINITERRRELATIKVLGFYDLEVAEYVYRENILLTIIGALVGAVFGKYLHAYIITSVETEVLMFIRRADFSSYIYAIIITFGFSIFVNWLMYYRLKKIDMVESLKSVEMSEFVVMENVKKTYKMGEVMIHAVDGVDIEIHKGEFAVIVGPSGAGKTTVLNMLGGMDRVTSGKVIVDGRDISLYNSRQLTKYRRDDIGFVFQFYNLIQNLNALENVELALQISKHPMDAKEVLKDVGLEDRMYNFPSQLSGGEQQRVAIARALAKNPKLLLCDEPTGALDYQTGKAILKLLQDTCHKHGMTVIVITHNLAIAPMADRVIQIKNGRVSEMTVNPDPRPVETIEWMAEQTTHTLPLREEVPAKDKWHIEDIFSNDDTFTSALEACRTHIDALAAFKDHLGDSAETLCTYLTEKEKVLVELDSLYCYAGHRSDEDTSNPHYQDLRGQVDFTGNHFYETTAFEDPELLSLPEDFIPEALKNYSELIPFTHYLENTLRMKSHTLSKEEEALMSLTMDLDSTPQSIFYMFNNADIRFESITDRQGNEIGISHGRFVPLLESSDRDLRRKVFQSYYRSFDQYKNTVAAIFAANLKKELFYTKARHYASSMEAHLSQNNIPTAVYDQLIEAVHDALPEMYRYVRLRRKMLGVEELHMYDVYTPLVSGEHASIPFDEAMEIVSRGLAPLGESYIQLLNEGMHGGWIDRYENKGKRTGAYSGGDYAHHPFVLMNYQGTLDNVFTLAHEMGHSLHSWYANHTHHYVDASYSIFVAEIASTCNEALLMHDLLERCSDPHEKLWLLNHYLDMFKGTLFRQTMFAEFEKITHEKTAAGETLNAQSLCQIYGDLNTLYFGPDMVNDPEISLEWARIPHFYMPFYVYQYATGFSAAIALSHRILTDGAPAVRDYIDFLKAGGSDYPINVLKKAGVDMTTKAPVASALSVFSSVLDETESVITSLGLMKKVVIVSACRTAIGAFGGTLKDVPAAELGALVVKEAVSRAGIKPEQVDEVIFGNVLQAGLGQNVARQVTLKAGLPIETTAVTINIVCGSGLKSVAMAANQILAGESEIVVCGGTENMSAAPYAIPTARWGARMNNNKIVDVMVNDGLWDAFNQYHMGITAENVAEKYGITREMQDEFAVASQSKAEAAVKGGKFKDEIVPVVIHGKKGDTVFDTDEYPKFGTTLEKVAKLKPAFKKDGGTVTAANASGINDSAAAFVVMSQEKAEELGLKPMATIVSYATGGVDPSIMGVGPVPAVKKAMTKADLTIDDIDLIEANEAFAAQSLAVAQELKFDMNKVNVNGGAIALGHPIGASGARILVTLLYEMQKRADAKKGLATLCIGGGQGQALIVEKAMNFTPLWTAALNAFSNFIIVDEHCRIAYMNKPYTEILNVQLEDVIGKPIKSVIPTTKLPEVMASEKAHIGALMTLYDHKTGKDISFVCNRIPLIEDGEVIGGVAISTFNEVGEIYNLYSEVEKMQQQNELYQQTIEQLRKQTNPLDYIIGTSQAIQQIKSTIAIFANSGLSILLTGETGVGKEVFANALHQLSSRSTSNFVKINCAAIPKDLLESELFGYEGGAFTGAKKGGKIGKFELADGGTLLLDEIGEMPLPLQSKLLRVLQEKEVERIGGVTPIKVDVRLICSTNQNLTQLIQDGRFRADLYYRINTIELAIPPLRDRLDDIPDLCNFFVQKFNRENGSYTQGVEQEVLALMQQYTWPGNVRELEHVIERLCFLNPHSTIGIASCDFLMNKLSGDHTLSRPAAAFSSLQEQRSSAEIDLIRQTLRQTDGNKAKAARILGIDRTVLYRKLKKYHIDMKKLEIIIKPEKLESLKNILDDCEASGLMITNIMGYGNQKGYTRMYRGTTYNVNLLPKVKVETVVADDAAEKIVDRVVKEISTGNYGDGKIFIYNIEDVVRIRTGERGADAIMADKKNRVPVREQAPEVRAKNFEEVCLGYNKEEAMEEASRCLNCKNARCITGCPVNINIPAFIAEVKEGNFEKASQVIGESSALPAVCGRVCPQESQCEGKCILGIKGEPVSIGKLERFTADWARENNIAPIPAKEKKGKKVAVIGSGPAGLTCAGDLAKMGYDVKIFEALHEAGGVLVYGIPEFRLPKQTVVAHEVENVKKLGVEIETNVIIGKSITIDELINEEGYDAVFIGSGAGLPKFMGIPGEQANGVFSANEFLTRNNLMKAFRDDYDTPIHQGKKVAVIGGGNVAMDAARTALRLGAETYIVYRRSEKELPARVEEVHHAKEEGIQFHLLRNPKEILVDENGWVKGLRVIKMELGEPDESGRRRPVEVPGSEYDLDVDTVIMALGTSPNPLISSTTKGLDVNKWQCIIADENNGATTKEGVYAGGDAVTGAATVILAMGAGKAAAKGIDEYLSNKMYQIVKAEKLADKIFLMEIEAPRVARACQPGQFLIVKMDEVGERIPLTICDYNREKGTVTIVFQTVGASTEKMSWLREGDFFQDVTGPLGKASEWIEDDIEELKQKKILFVAGGVGTAPVYPQVKWLHEHGVAADVIVGAKNKELLILEKEMEAVAGNLYVTTDDGSYGRHGMVTAVIEELSAKGTKYDFCVAIGPMIMMKFVCLLTKKLEIPTIVSMNPIMVDGTGMCGACRLLVDGKVKFACVDGPEFDGHLVDFDQAMQRQQSYKTQEGRAMLKLQEGSTHHGGCGNCGGDRMQIKINGQTISLAAPEPFLSILRREKIYFPLYCGGRGTCGKCRIRITEGSLPITTEDRQFFSEDELKAGYRLGCRAVITASCAITFEEIQREDGFYVPSVQHAESLVREPIQRQNTAEAYGVKSDKDSRMPDKVSLSIAVDIGSTTLVMALVHTDSGKIVTEYRGLNHQRSYGTDVMARIKAAVEDGQEQAMQALIRQDLAEGIVSLLKSADAPIEQIVIAGNTTMLHLLRGYDCRGLSAWPFQPVNLDFEELSTAELLGESPLVENCLLKQTKVTLLAGISAFVGADITAGLWGCGMNRNEKPHLFLDLGTNAEMAVGNKEGMLVSSAAAGPAFEGGQLSCGTGSIPGAVRDVRIQYGLVRYETIGRKPPVGICGSGLVSAISEMRKSRMMDNTGRLSLRYASRGLEIIPGKIVITQADIREYQKARAAIRAGLEILVENAGYRMEEIEALELAGGFGSQLDIAKAAGAGLIPEKLAERVHILGNAVIAGLCVYIQSPDQEGIRRMIQHTREISLAKQPKFTKTFLDFSCFMRLLLHICCAPCSVMCIETLRAEGIEPTGFWYNPNIHPVTEYKARKNTLTKYAADIHLRLIVKNEYGLRNFIDHVYPHYESRCGYCYLCRLEETARFAAENGYDSFSTTLLISPYQNHELIIKTAQAMAKKYHVTFLYRDFRPYFKEGQEKARAMGLYMQKYCGCVFSEEDRFLDRKKGLVTIQKYNNRKEEDAGHKTGGGKDDGDQDSRKEKSLMKWQDVVIKKVFFCMFDTTLEVVPYSGYVPGDEDEMYRYLCQMVAKYYYHETSRKGFIHEESELQQILPETGDQFEAFVNCICDEIQDLMHANPEIQTGAGMFAWVTLEDQDYITFFKSNYQSRFLVSQDENSAVHWTLNHMILPGPSPKVNEYFYLNLNDNQAQVSDFECYIDGLKQNYLADQVLKLDFKPSEAVTVKAIDDSVVETIKHCYEEQAPQKIMEYKTIVVDQVKEKGQIIVPELEEAVFKDNEQAAVLYQEVAEQQQIPKIPVYVSKKTERKLGKKQKLVTDSGIELLVPLELLKDESILEYHQNDDGKMSILIKEIGFIENKMDKNVSKEVKRIIICCIASCIIAVNIRTFVRTGGLFPGGANGLTLLIQSIFDRYLHIAIPYTAINVLLNAIPVYIGFRFIGKKFTLCSCLVIFLTGFLTDSLPAYTITSDILLISIFGGLINGFAISLCLKCDATTGGTDFISIFLSRRKGIDAFNIILGFNVVILAIAGLLFGWDKALYSMIFQYTSTQVLHLLYKQYQKQTLFIVTNKAEAISQLIYDTTVHGATIIDCEGAHKHSEHKIVYSVVSRDENNSVIRAVRKADPQAFINSMPTNELEGHFYQRPIDITVPRAFGYEIYTVISGSMEPAIPTGSLVYVKYIQPEEIQTEDVIAFYGTDADGSIVTHRVVSNSAAMGNFITKGDANSDNDMNMSFNIIKNTLETQENGVLIIENDVYRIKMRYIGNYTEDLKNHKLNTDYLTVNSKIKQAHSVYMPTFTLMHDEVMFKIIDTGAGIFDEKSMDNMIADFTLAHRCLNDFKRIIQQYFPTEMRDRSKEIAMLEDTLKILKQGRYEKNGNFFQKCGMLMVKNMREGKGIALLPIGVFLVLYLGLGILFEYVMEIPMGFYNVPIVIAFLAAILVACLQNRALNFDQKLEIMAQGVGDKNIITMLLIFLAAGSFVGVVGRSSAESVAYCMLSLIPARFSVAVLFIVGCFVSVAMGTSVGTITLLTPIAVAVSTASGFDLAFCVASVMGGAMFGDNLSFISDTTIAACNGQGCEMKDKFRENFWIAFPAAVVTLILILMLSFQTEIQGHVIQPYHLTQVIPYVLVLIGGIVGINVFVVLLIGIVSGALIMLIGGHTVPVEILKNMGSGVSGMFETCMVAILVAAMCALIREYGGFDALLSWIHRIFRGKKGGQLGMGFLVGTMDIATANNTVAIVMANPIAKEMAEEYGITPRKTASLLDTFSCVFQGVIPYGAQMLVAISAVNELGGEISAFQIMPKLFYPLLLLLSSLITIMKSTYKCSNFHTMEMKAGMKCETEIVVNEGMLANHNDPQLPAIELPAVFSTPSMINLMELTCAKLMDNCLEEGKGSVGMSVEVKHLASTPCGKKVRCEVEITEVVNGKKVTFAVNAYDENGLIGTGTHKRAVINKAAFNMMFNGNNSWIRWQAERPAAYPAFLFSVRWMSRLPNTSLFKAQGGRIMNDQRKRQINDSQNFRTDRVLSYFKVEWKVLLAVTISGLIYNVGLLAGPWFEGKMTGCLLNILNGSGAFADMRILVIAYVVSIAIVQTARYIKRFYVRRFANNVNRRMKEILYGSLVRKSRAGLHEEGEGNIMTKAILDVDDCAEGMRKFTTEIFDTGVALAAYAGMLLYYDWRLALLCMVFPPVSYTIAEKMKTVVQRTGAAYKVQSGVLSEATLDRAQNAITYRVFGCEQERQLAYEEKLTAYERSAVKANIWNASMPPIYRMISMTSVLFILYFGQKNVLGIGWHPWTIASFTTFLACFVKLAVKSSSAAKLFNAVHKAQVSWKRIRPLMQQRKEQYERTVCPPADLKVRHLNFAYPEGKKVLEDISFEAKPGEIIGITGTVACGKSTLGKVFLCEYPYEGEVLFGGKELQKQSASERTGIISYLGHDPELFNDSIEANVLMGDQADAAYFLQMVCLDKEVDEMDDGLNTLVGKGGIRLSGGQAQRLALARTLCHQKPVLILDDPFSALDKNTEKQIFANLRQMTKDTVLLLISHRLYLFPEMDRVLWMENGHTISGTHQELLEKVPEYQVLFEAQTEDRNRSDAGAHTDEKVHSDKNVFEMEQAIQKAGADNGTKMAQNKNGQVKRVILDTIARWKGLSFGIVCAVIGAVVFALIPPLILAKIVDTVTAGKQTSWAVIMLYFVMLAVVAFMESVREGLLIAFGQKITHALRSRLMEKFVHLTADNINQQEPGTLVSRFVGDVDTVENLFTSGIISMFADVCKIISILVVIRFKNPGLTVVLIVMLPFLFVFTRHVQKNMLTAQIENRKAVGRASGHVPETLHNIRTIHCLAIEKYMEKRYDTYISESYYAMERTNFYDAIYSPVILILNAVVVAVVMLLSASGNPHVLTFFGMSAGTAVAVINYISQIFTPVESLGMEIQTIQSAVAGIHRINEFLALEELPDKDIEMEKTAENQTQYGEDQGKAGVPFVEFRDVTFGYDSHIVLDHVSFKVMDGEQVTLSGRTGAGKSTILKLLLGLYEPQQGEVLIHGQSASEIKEASRRCLFGYVEQSFHRVPGTIRDQITLFDDKISDAQVRAVAELTGLKTAIESLENGYDTYCTPDLFSQGQWQLLSIARAAAAQPKLLLLDEITANLDAETEKAVLRALKKVAENRTVISISHRTSAEMGRIIALMVNFKEDEQLKMLNHSCAHLMAQAIKHLYPQAKFWVGPVVAEGFYYDVDLGDDVIRDEDIATIEKEMKKVAKSGKKIVRHEISKEEALEMFKDDEYKIDLINGLEDGNISCYTQGDFTDLCRGPHVDNVKLCRHFKLLRHSGAYWKGDSKNKVLQRIYGVCFPTAEELEAHLQLLEEAKERDHRKIGKDMELFMVDDLVGRGLPMFLPKGYTIWQELENYIKEKERKLGYQHVMTPCVGTVNLYKTSGHWDHYKENMFPAMEVDDEAFVLRPMNCPHHMMIYANKRHSYRDLPIRIGEIAHDFRYEASGTLKGIERGRHFCQNDAHLFVTPEQIKDEISRVVDLIFSTYEDFGITDYRCVLSLRDPEDKAKYHDDDEMWNKAENALREVMNELGLEYTEEIGEAAFYGPKLDVNVKPAVGNEITLSTCQLDFCLPAKFQLTYVDKDGEKKTPVVLHRAILGSLDRFMAYILEETKGNLPTWLAPIQVKVMPVKTDDDGLNAYANEICELLEAQNVRVDLDDRAEKLGYRMREGQIQKVPYLLVIGFNEKDNRTVSYRLHGEKDTTVVGLDEFVEKIVDEIKNKVHMILNRYEIFLKTAEIGNITKTAEILHYTQAGISHAIAALEKETGFSLLARSASGVTLTENGKRLLPYIQTLVNDQHGFSQAIYDINETVAGTLRIATFTSVSTQWLPTIIRKFQADYPLVEFDLLAGDYDEITERILSGRVDCGFLTAPVADPLVFHLLYKDPMNVLLPERHPLTRQNVLTLPEIKKEPLVLPTKGSDNDIQAVLNSTRDKTNVRYVLNDDLSVISMVSHGFGITIMPELILRNLNYSLEIRPIDPPQYRAIGIASMPLNRVSVLTKTFIQYLTDPSKIDFNELCSMREYGWTQQRADSILALVAMAWGSSYLLMKIGLDGIPPFCIIALRFGIAFIAVSFLFFKKFKKTTKRVMMKGAVLGLFLFGLFAFLMHGLQTTSASNGGFLTSTTVVLVPIFHAVIKKKMPDHQNVLSILLTMTGICLLTLQQSLVFHSGDILCLAGAAVYAVQILLTDKFAQEEDGMLLGIWQLGFAALYGVICTFMFETPTLPSSGFQWIAILGLAFVCSAFGFVMQPMAQKYTTPEHTGLLFALEPVFSAVFSYIFLHETLSGKGYMGAMLVMAGVVAASVVREKRQPVRVVAHQSMCSAVSYILCINSGKYHIAYRLYFESPYTNVAVFKISAERMVFQESETVELKEVVVDDIRKEIIAFANCDGGKLYIGVRDDGTVVGVDNPDRTALQISNMARDAIKPDITMFMHYGTIEESGKKIVAIDIQRGTDRPYYIAKKGMRPEGVYVRQGYSAVPATDTAIRHMIKETDGDRFEAMRSLNQDLTFNAVKKAFEQRNVDFGVQQMRTLKIIDSDGLYSNLAMLLSDQCTHTIKVAVFQGTDQTVFRDRKEFAGSLMQQMNDVYAFIDFRNQTHAAIEGLLRIDTRDYPEIAVREALLNLLVHRDYSFSASALISIYEDRIEFVSIGGLVPGIELEDVMAGISICRNQDLANVFYRLQLIEAYGTGISKMMMAYRDMLQKPVIETTKNTFKIILPNVNVQKQYAQTKPPVYRVEDQSMQYSYNAAEIKSLSDEEEIILEYIGKHDRLTKQQAAELLEVSASTATRLLKRMVESHMLKRNGKARNTYYTEIKMCRLERGFNVFMEAFSQFVGHVDSMIWSMVLVLLCLGVGLYLSIRMKFPQIRFLKEMVHLLGAKEESENGITPFQAFATTVGARVGMGNIAGVASAIYFGGPGSVFWMWIITLIGAASAYTESALGQAYKVKNPDGEYMGGPAYYIEKGLKCKPYAILFAAVAFLGPGFLMPGVQINSLVTVFEEAFSVNKILVGAICCVILGIVVYGSIKRIAKIAEMLAPVMCGIYIVAAVVILGLNITKLPGILGMVVSSAFGKHAVFGGILGSAVSWGVKRGIYSNEAGMGCGAIVSAAAECSHPAKQGLIQSFSIYVDTLFIGTATALIILLTGTFDVCDGAGNLLLDQTGGIEAGIKWTQYALMNTFGTWSGKALAIIIVLFVFTSMTGYCYQAEANIRYLTHNSKLAVNICRAVFLAASFFGAIVNADAIWSMGDIGYGLMAWANIIAIALLAPKASAMLEDYEQQKKEGKNPVFDPTKFGIEDETGAWKRKMEQDYIYMEETTVKSSSEVRNVHIRIRSVVEGVENLWETTGEYKWDGRQHMLAYTDYTGNAITKNGIFADHEKMLLHRVGAITCDMLFDPLTATMVDYKAYMVGAKFLLHTETYSMEENEVGLNIRVQYTLDDGGGHTPIVGEQEITVEYYMVKTVLKIDGMMCGMCEAHMNDLIRKNFKVKKVTSSAKDGETVIISDAELDIPWAKKQIKDIGYELVDYTSEPYEKKGLFHFGRKMYITCLDVEGVLVPEIWIAFAEASGIPELKKTTRDEPDYNKLMNWRLGILKEHGLGLKEIQETIAKIDPLPGAKAFLDELRTFTQVILISDTFTQFATPLMEKLGWPTLFCNTLEVADNGEITGFKMRTEQSKLSTVKALQSIGFETIASGDSYNDLGMIQASKAGFLFRSTDKIKADYPDIPAYETYDELLDAIKKAMVMYKRESGGWLKHYDFLLLDMICLQIAFLLSFVVLGRGFNPYSHILYRKMALYLELADVVVVFCFDSFSGVLKKGYYRNFVSTVQHAAIIFALSVLYLFLSKEGQLYSRLSLVITFVLYIFITYAVRELRKREMRKQMETGSKQSLFIVTTEDIAGQVVDRMLKNNYARYRMAGIAVIDNSVLGHRIHGVDVVADAATAVHYICRTWVDEVLIVISDNQPYPKKLIDQLIETGVTIHLNLAKVSNISEKKQFVEQIGPYTVLTTTMNYASERQLLIKRVMDIAGGLVGCLLTGIIFIFVAPAIYISSPGPIFFAQERVGKNGKKFKMYKFRSMYMDAEARKAELMKENKLGDGKMFKMDFDPRVIGNRILPDGTKKTGIGDFIRRTSLDEFPQFFNVLKGDMSIVGTRPPLVSETKLYELHHYARLSIKPGITGLWQVSGRSDITDFEEVVRLDREYIDNWNVGMDIKILLKTVAVVLKKDGSMMKGIILAGGSGTRLYPLTKVTSKQLLPIYDKPMIYYPMSVLMNAGIRDILIISTPQDTPRFENLLGDGHQFGVNLTYAVQPSPDGLAQAFIIGADFIGDDSVAMVLGDNIFAGHGLKKRLETAVHKAENGKGATVFGYYVDDPERFGIVEFDKNGKAVSIEEKPEHPKSNYCVTGLYFYDNRVVEFAKGLKPSARGELEITDLNRIYLEDGSLNVELLGQGFTWLDTGTHESLVDATNFVKTVEQHQHRKIACLEEIAYLNGWISKDDLMEVYEVMKKNQYGQYLKDVMDGKYQEHLYMNIIVTGGAGFIGSNFVFHMLKKYPDYRIICLDKLTYAGNLSTLAPVMDNPNFRFVKADICDRDAVNQLFEEEHPDMVVNFAAESHVDRSIENPEIFLQTNIIGTAVLMDACRKYGIQRYHQVSTDEVYGDLPLDRPDLFFTEETPIHTSSPYSSSKAGADLLVLAYHRTYGLPVTISRCSNNYGPYHFPEKLIPLMIANALADKSLPVYGEGLNVRDWLYVEDHCKAIDLIIHKGRVGEVYNVGGHNEKQNIEIVRIICKELGKPESLITHVGDRKGHDMRYAIDPTKIHNELGWLPETKFEDGIKKTIQWYLNNREWWETIISGEYQNYYEKMYSNRMRFFVTGVGGQLGHDVMNELLKRGHEGVGSDIQECYSGAADGSAVTRAPYRTLDITDREAVHNVIAEIHPDVVFHCAAWTAVDLAEDEANIDKVRAINAGGTKNIADVCKELNCKMIYISTDYVFNGQGSEPWRPDCKDYAPLNVYGQTKLEGELAVSQILEKYFIVRIAWVFGVNGKNFIKTMLNVGKTHDTVQVVNDQIGTPTYTYDLARLLVDMSETDKYGYYHATNEGGYISWYDFTKEIYRQAGYQTKVLPVTTEEYGLSKAARPFNSRLAKGKLVEAGFVPLPTWQDALSRYLKEIQYMGQIKVEKNVGGIAGLCVIEPAVHGDARGYFMETYSQRDMEENGICIQFVQDNQSMSSKGVLRGLHFQKQYPQTKLVRVIKGSVFDVAVDLRSESETYGKWYGIELTEENKKQFLIPRGFAHGFLVLSDTAEFCYKCDDFYHPNDEGGMAWNDPEIGIEWPKVKGEYRGNADAEGYTLQDGTALNLSDKDQKWLGLKDTFKFMQQNRDIQHVYLVGAKSLGAYGGYETFIYKLTEYHQYNKKIKYHVACKANGDGYMDESKLEGAALINDHEFEFHNAHCFKIDVPQIGSAQAIYYDVAALKMCCEHIRKNHIQHPIVYIMACRIGPFARHFYKEIHQCGGQVYLNPDGHEWMRAKWSAPIRKYWKISEQMMVKYSDLAICDSVNIEKYIHACYDGKGIKGRNPKTTFIAYGADLTLSKLTDDDEKLVNWYKEKGLTKKNYYLVVGRFVPENSFEVMIREFMKSHSKKDFALITNVNDKFLNELEEKLHFKRDKRIKFVGTVYDQELLKKIRENAFAYFHGHTVGGTNPSLIEALGSTDLNLLVDVGFNREVAEDCALYWSRDDGSLAKLIDSSDQLNENQIAEMGRKAKARVAAEYTWNKICGQYEEVFVKMKILHYALGFPPYRSGGLTKFCVDLMVQQTREGHHVAMLWPGKIGLINKKTAIKRHKNVELNGKSIDSFEIVNPLPVPFDEGIADITAFTADAETGVYDELMASYKPDVVHIHTFMGLHKSFLMAAKKRKIRMVFTAHDFFPICPKVTMFQQGAICGDAKSCKGCGVCNTTSLSLKKIQILQSPIYRNLKDSVIVKKLRKQHRDNYFSEEAFDNTTQPVGTAEDYEKLRDYYYSLLKIIDVIHYNSSVTQSVYESFFDLPVSCNIAITHSDIKDNRVIKEFADDKLRIRYLGPMNGAKGYFLLKEALDKLWGKRQDFSLDIHFAPNDMMPYVKVHGRYTYKDLKTIFKETDVLIAPSICYETFGFTVLEALSYGVPVIISGTVGAKDILVNGAGIIIEDISSERLCKVLQRLTPGELKEMNQKIVAEQFIMQIEDMEEQIEKICYGWMELEKISVIVPVYKVEKYLKRCVESIVQQTYQNIEIILVDDGSPDRCPEMCDEYARRDARIKVIHKSNGGLSDARNAGLNIASGDYISFVDSDDWIEEDFIEILYKNMKKENADISIIGYTLIWESGRKKRFTSDDEYYVFDKEDAVRELLKQQKFQCMVCQKMYRKSIFRSIQFPIGKIYEDVAIGLPTFLQAEKVVVDGKSKYNYFQRKDSIVNTKFDQRKLFFLECCQEIIDYSNSQNKKYDMEAHTFYLRALMMFTLQLYQIKEKNEETTIDYLEHEIRKCKKYIWKNSCLDLKKKIVLFLISIQFPRKILVELWSGGKRMEIVKKFKKIIKNTTPTTIIKTNLIFALIERFLVQVIGMPSAIIYVIDLLNLWLIVWLWKDREKCKQYFGLLKIYLGIILVLVITGCVYYGEWGGNVASTAIEIRNIVRFPIFFLACVIFLNNKEVKKIYKVLVIFFAINAVAILYQYFTFHPPGVWMRGDMLNGLFGTETGGNTFVNVILLVVITYMLVCWSKRKVSTLVFFGSVCISLLISALIELKAFFIEVIVIYGWYLIRKKKSRKEKYLNIFLIAAAIIVSAVGLQIMYREYPWFRETMSLSGMIGQLTGSGYTGNGDLNRFTGIFTIASEIFDGNPLKILFGIGAGNCSQSAVLGSSTLFYNQYFETHYNWFSATYLFIEGGAVVLILYLTTFVYLFFKKKENKQYDLNSQIMCMLAVFLVFYGEALRTDAGYFVYFALAAEFIKPDKKINVKGLKKMADDIQVSVVCLAYNHEKYIRESLDSILNQDTSFKYEVIVHDDASTDHTAEIIREYEKKYPDKIVAIYQKENLYSKGVAIIEEQMLDKAKGKYIALCECDDKWTDSRKLEMQYDYMEAHPECSMCTHNTIIHDLNHLQGDKLFNQWEEQHILTEVEAFMGWCVHTSAFFVRKENAYRPKEFRKYWFGDYVRVTTAYTEGKVVSLPYVMSQYNYGVKTGALYSADHDDLRARKDSVLSRKEYLEKLNAWSMGRFQQIINRRILLTELEADSLHERDILNYSNDKKEIVSAVKQIVEKVSYKNYISSLTGIGKMKEWIRYNGYILYPLWVKIWRKMTVISNLVWRFAERCGAQLVSFIVSIVLARILAPEDYGTIALVTVFTAILQVFVDSGLGTALIQKKDADEIDFSSVFYFNFVVCLILYLGMFAAAPFIADFYGDVTLVPVIRILSLTIVISGVKGIQQAYVSRNMLFKRFFFSTIGGTIFSAVLGIAMAYAGFGIWALVAQQLSNTFIDTLILWITVRWRPTKSFSWTRLKYLLSFGWKLLVSSLLDTAYNNLRNLIIGKMYSSSDLAFYNQGDKFPKVIVTNINASIDSVLLPTMSSAQDDKERVKQMTRRAIKTSTYVMAPLMMGLAFCAEPIVSLVLTDKWLPCVPFLRIFCITYMFWPVHTANLNAINAMGRSDWFLRLEIIKKIMGMTILLSTMWFGVMAMAYSLLLSSVLSQIINSWPNRKLLGYGYLEQVRDFAPGILLAVIMGICVYFISFLHLSTIVTLLIQFIVGAAIYIGVSAILKLEEFEYLLGMVKSFLKKMNNKILVTRSSMPTLEEYMNEIAPMWESHWLTNMGPKHKELQAKLCEYLDVENIDLLTNGHMALELTLQAMNLQGEVITTPFTFASTTHAIVRNGLTPVFCDIDPETYCMDAGKIEGLITDKTCAIMPVHVYGNICNIEEIERIVHKYELKVIYDAAHTFGETYQGRGIGSFGDVSCFSFHATKVFNSIEGGAVCYKDQQLGEKLYELKNFGIHGPEEVPAVGANAKMNEFCAAMGICNLRHVDEEIAKRKAVVERYRERLNGVEGIQLNCIQKDVKSNYAYFPVVFEEKLFGSSREEVFDKLAENDVVARKYFYPLTNTFECFHGKYDATKTPVAMHISKRVLTLPLYADLALKDVDRICDIILGCKYKMKKLMVLGGSRYALPVIEAAHRLGIYVITCDYLPDNIAHKYSDEYCNVSIIDQEKTLDAARKLNIDGIMSFACDPGVVTAAYVAEQMGLPNVGPYESVCILQNKGKFREFLTKNGFNVPTAKGYKNAAAALKDIEMFHWPVIVKPTDSAGSKGVTRVDKPKDLEKSIRYALSYSHSDEFIIEDFITQHGYSSDTDSFSIDGELKFVSFNCQRFDREAKNPYTPAAYSWPSSMTAEHQEELKNEIQRLLKLLKMKTAVYNIETREGTDGKAYIMELSPRGGGNRLSECLRYATGVDMITNMVKYAVGLPVDDVEQRPYDGCWAEIILHSDKPGIFKELWISDDIADNIVERDLWIQEGAHVGGFEAANEAIGTLVLKLESQERIEEILGNQSKYVKVKLAMKKIVVFGASGDTGQYFVRYFLENYKGNEYQIVATGTRETDCFKKMNVSYYQVDITKKEDFSKLPENVYAVVDLAGAMPARMRGYNPYKYIDVNIIGNLNILEYCRKTGADRILFAQSFGDIKDYGEKNPILTVDLPRKFSFTSDHTIYVMTKNFAVDMIENYYQMYGLKRFIFRLPTIYLYSPIDTFYVDGEKRKIGYRVLIDHAVKGEPIEVWGNPNRKKDMVYVKDFCQMLYKAIFVNRDCGYYNVGTGVGTSLLDQIRGMVEVFGEGDKKSQIIMRPDKPNAPQYIMDITPAIQELGYKPKYNYLEMLRDFKREMQYAENVGRMKMGEKLTFVNFIKRITDGWVKIFFRQDVMGMWWVGLIKCMGVLVKEARDCRFNDMEFYDIHSHILAKVDDGAETFEMSCQMLDMAYEEGIRHLCVTPHYNRHNADDAERPKKVMRAFRALELYAKKQYEDMHLYRGNEVMYFPDMVKYLDSGSITTMNGGRYVLVEYKPNASYHNVYSGLQQILYGGYLPVLAHVERLDCLIDEWDKLEELKESGIILQMNTDGLIGGRFDRWVRRCRALVEDGYIDVLGTDAHNMTSRPPQYRKAAEWIEKKCGQARLRQLAEENPRAILENQLISTMEKKRNDNEEMEIDLLELLMVMKKHLAAILLAGIVGLVIMFACTTILMTPLYSASSMMYVMPDNSNSNSSTLSDMQVGQQLTSDYSSMIESRSFMEDVIKKLNLTIDYQQLLEKVEVTNPTSSRILQVTVNDPNPQTAADIANEVASVAESKLKEITGMQAIKIYEEAAVPEKPSSPSLKKNCALGLLAGIVLAMAVITVLYLMDDTIKTEDDIEKYLGMTTLAVLPYNGKKQQRHAKKQKKQRAKQGKQTSRKRKEIETDEFNMNSINLTRIDDGEAVSEYYKQLRTNIYFCGQDKQCIAFTSSFPNEGKSTVVFNLCKALAEDGKRVILLDADLRKSVLYNRCMPDQEVKGLSHYLAGFVPLNDVICKTNIKNMYMAFAGLNAPNPAELLGNPKFKAAIEAMKKSFNYIIVDCAPIGAVIDAAVVAKSVDGMVMVIEQKKISRRMAQKMKEQLEASGCPLLGVVLNKVKISENKSYGGYGQYYGHYGKYGEYMQNKINSKMINNRKSLIQDDYIEKYLAEKELNLTATLDAKTAYADADFVVIAAPTNVYSIKSVAVMKVCLVGSSGGHLTHLYMLKPFWKDKDHFWVTFDKEDARSLLEGEKMYPCYYPTNRSLKALIKNTKIAWNVLHKEKPDLIISCGAAVAVPFFYIGKMMGAKLVYIEVFDRIDKPTMTGKMVYPIVDKFVVQWEEQKKVYPKAVNLGSIFMIFVTVGTHEQPFNRLIQKIDELKKDGTIQDDVIIQTGFSTYEPKYCQWSKLIPYQQMVKNVADARIVITHGGPASFIMPLQIGKTPIVVPRQHQFNEHVNDHQVEFARNVAQRMGTIIPVEDIETLGDIITNYDQIVAGMGHGMSSNNAKFNEELEKLVDDLFGGENMKELLIMAKSLGGGGSEVALIELINALPEELYNITLVLLDSDNEYAYRLKKNVNIVQLTFNSSFAKSLVSMYAFPAKVLKKLSVNSFIPYYDFISNCVTNVFEKTYDIAIDFYGYGSFVTAFLATKIQAKKKATWLHDEKPYWMKSVQKYLCEYDKIYGVSQAVVDAFCREYPHYKDKAAVFYNVIDIEEIKRKSEQDEIIPFKESFNIVTVGRLTEQKGYDIAIKAASILKKRKINFAWYAIGGGRDEKKLKKLVEKYCLENQFVFLGRKKNPYPYMKHCDLYVQPSRHEGYVITLVEARALCLPILSSDIPSAREQIQDGINGYVVELSAEDLADKIEYLYNNPSQRKKTVEYLKEHPIDFSTELLKLEIIMRKFKVVMITSYFDRNGVTSQVINYATNLDKNKFQVAIAAGEPYDIGYEKACQENNIELCKLPQKQKNAYMYYKTIYSFLKKKKPDIVHVHGSSTLIAVELFIAMLAGVPVRISHSHNTTCSHPLLHETLKPFLKVVSNCYLACGELAGKWMYGDGAFKVIPNAFETEAFALNSETRLLIRKKLEVGDNLVIGHIGKFNNQKNQNYLIRAFEKLSYEDDKAILLLVGNGPDLAEIKNQAQHTACADRIIFWGATENPEYLYSAMDVFALPSRFEGLPVVLLEAQISGLPCIVSDKVTREVDFGDIIWKSIEDNPQIWADTILSMGQRTEEQRKQYCLKHAKQIAQYDIQESAKKVENIYERQLQKKKKLLMKILHKGCIGLVSAWKVLCAKICACGKFQATWVNSIRGALKIEIIGNGCIAVGHFLMSRGPLYLKSVNGGKITIGENVFFNHNCSLTCAESIVIGDNCMFANNLVIIDHDHKILKDGVTGALVSEPIIIEERVWCGANVTITKGVHIGRGAVIGANAVVVNDVKAYSTVAGVPAKKIKMFHDTLIPFAERWIINMKEEITVIVPVYNVKPYLRQALDSIREQSYSNYKMIVVDDGSTDGCAEICDEYKAADPRIEVVHKKNGGLMSAWVCGLEQVKTEFVVFVDSDDYIAVDMLQIFMESQRKNNADVVIGNYKWFNESNMVREKNKHKAGFYSKERMLKEIYPNMINAGKFQSRGLVLSRWGKLIRTNLIRENLKYCDLRISYGEDLNIMIPVFCDCNSIEIVEEQSSDYHYRMNPHSILHTYKSTMLQQVELLYEKLNQAVSDKRMDYLKTQLQADYLAAIVQCFKNELSNTNGKKVIVNNIELMGENKKVKKAISEVDWKNYELKNKVIIYSLKHRNFFTRDFLIGILQHILCNTMNKEFSIIIPVYNVANYLDKAIESVLSQNISADMYEIILVDDGSTDASGDKCDQWENRFPTLIKVIHKKNAGLGFARNSGLEVASGEYIIFLDSDDYWIDDDALRKFEIKIKEEKPDVVVFKNCIYDELTGTFKEPKKDRESEIALEDAIKLEYFDFSAWNKAVKRSLLVDNNIAFKKGISEDMLWSYKILLYSKKISFCLEKSVYAYRKGRTGSLTAQKCVTYREEYFKILDDIGNLMRSNENIKAADLYASMVYITLFRYLRNSLDLSEQDVDFVQCLSKNKSMLRCCANWKIAIIRFMIYTLGVKNTIAMFRKIKRMKVYRYKIISALVLLLCVDVTYLNEIFHRLPTIQYYGRCVVLLYMLLDCVRYRRHLSKILKCIFVFVLWVLGITYIRGGELIEALKVFSSPLLLCVYIDKKRNSTQLYGYLDTWKSVLLVFVCIDLFTQVLFPHGMYRDTMYSLNWFLGYKTARLAFSLPLCVLSSIVDMHNRKRLTWRTWICYALSVETLFYSQATAASITILIVEILIALICINRRGKFTERVWEKLLNLKFVLAIYAVISVLVVYVQNSPQIQYILVNIMHKDPTLTTRTYIWNLCIESLAKQPLTGLGYLNSLNYQNLTNNMYATSAHNMSLSILISGGFIGLAIYVIIIIVAWQSFKINISIEKKITSIAIIAILIIGMTSSSMVFSSCAFIFYELMAILDMPPLRKNFNIKSGEDMQNKVSIIVPVYKVEKYLNNCIRSIVEQTYSNLEVILIDDGSPDGCPQICNEWRQKDTRIKVIHQENLGVSAARNRAIECISGEYILFVDSDDWIANNMVEVLVHGMESSEDVDAVFCGYVEVDEDDNLIRKVMPKHKEIVNRNQGVELIFGEYGTFLWNKLFRAKLIGNNSLFDRELKIGEDELWMVDVLKKSRRILAIDNPLYYYRRRMDGASNDYALSSKRLSEITAQQKTLKSIVDYRSDTLISLVECRLYYCGNKIMRLAYYQKQYDIFDMIDSEIEEGRKIWYKTHHNHLGNCRRRMVEVMMRARVPQKIVRILDKNDMIEWKRMIYLKAFLDENLGDDLFVQIVAHRYPNSEFLLFASDEYPVNFGNNVHFTFSKDSYKGLEQKIKLYDNRRKSRLQKKCFPIFFRPDHKEERAIVKHADANIYVIGSGFMEGGKIGIWSKLEEWLYYKRKPYILGCNFGPFFSNQYKNYYERLFAKANDVCFRESYSCDIFPELKNARWESDIVFSYNGYVDEKFGRNNGKYVVISVVNLDKDGAKNQNKEGYYRFILEIAKYFCERKTKVVFVGFCKNQGDDVAIENIVKNIRPEFHKQIEIINYPQNNMFYILGVFKDAEAVFASRYHAGIIGMLYGRKTYFLSYSDKMVNVLKDIDEKIRYININEEINVDVNEFILQYGYEILPARLDEIKKSAERQFLKLDSLLKMKINRTENAVRNILFGGILRVYQIVIPFVMRTVMIYCMGVQYLGLNSLFTSILQVLNLAELGVGSAMVYSMYKPIAEDDTDTICALMGLYRTYYQCIGLIIAVIGVGLTPFIPKLIKSDLPVGINIYALYLLNLSATVLSYWLFAYKNSLLQAHQRIDVTSKVTLITNTFQYVVQIFVLAVLKNYYIFVVVMLLTQAMTNIITSIVVTKMYPNYNARGRLSKEIVISINHRIRDLFTSKIGAVIVNSADTIVISAFLGLTMLAIYQNYFYILSAIISIGTIVFSACTAGIGNSLIVESKEKNFYDLRKFTFMVAWFAGFCTVCLLCLYQPFMDIWVGKDLELEFLAIICFCVYYFVYEINQLLNLYKDAAGIWHEDRFRTLITAFSNLIMNLIMVQFWGIYGVILSTVLSTVFIGMPWLLHNLFTVLFNKNQLVPYFKRLMMYAAVTVATCIITYGICTTVKLSGWTLLVIRLIICCTIPNIMFMILYRKLPEFKDSFAMIKKILKKNLMETSILIMAAGIGSRFGTGIKQLEPVDDSGHIIMDYSIHDAIRAGFNHVVFIIRKDIEKEFKEVIGDRIASICTSHNVTVDYAFQDINDIPGTLPEGRTKPWGTGQAVLAAKEVIKTPFIVINADDYYGKEGFKAVHEYLVNGGKSCMAGFVLKNTLSDNGGVTRGICKMDDQNNLTEVLETKNIVKTETGAETDGVAVNVNSLVSMNMWGLTPEFLDVLEEGFKEFFEKEVPGNLLKAEYLIPIFIGELLEQGKMSVKVLKTNDTWYGMTYHEDVAAVKDSFKKMLENGMYKADLFSDLMKEMIDLLGKILTNILTALYEPFGFSILLSFLAMFFYLYAYEPTAAGKGWKNAIVTWYQKFKKSGFFRKLFLLVFVTSMILFRTLLNRNLWMNPLSNIMGGWGIWETVNGERKLTTECIENVIMMVPFSAIVLWTFGEKIGNGWKKILWYSGKIAFIFSVSIEMLQLLLCLGTFQLSDIFYNTVGGVIGDWRIDVLRVYDTLKLPEKSVKNPMYTMSQINHIKDLSNCGYRISEISKKTGADPKTIRKYLSQEDFSPVPPVVQTQPSKLDPFKPVIQEWLDMYSESPNDARNNYYFYSKGNVIYTGAGHSKVDGDEEIQLFINAMVAAANVTAVKPEVDFVDTLNPDADIESARYYATDQSSWKEGENNILEKDMTFNINVKDYNMVSADLNQEDLDKQKMEISFFINDDKGSTLEASSEAGSSSDGAPSESEKVTNITNRIGTLKSYDGKTIEESADTFDITENNAFSLNVADIEQYLRDTGSSDNLNGYKKSCKLYVRVKSTVYLYGKENSNISWASIDLKQRQLFELNMLQLLPQRWDNVNGNWNLATDSKFQSMIKNIDDFEIKIETKTLTEINNMNKGEMKKLLSEKQMLVIGFDDVYQDISDKNGQVQDILDFIKSGKSVIFSHDTTSYINYDKNDMYEKIADSDYELGNNNEHTSIYNDNWLFSRNRTWGLSLNTILRSVVGMDRYGITSTEQINGETVSALLKHGKALNSQSVDFGTLMTLAGDIAWQTNGSRESSYAQTQAYTNNMLQKGSIGDKVTTTATKINDGAITQYPYVVGNNIQVAKTHGQYMDENTVAVGKDIDLETVILQNVDLVENIGAFKEVAEQFQQLMMMYSCAIREVRTKLEVLNDEFQVQRSHNPISYIKYRVKKPRSILEKLKRRGYPVTLQSVEENLHDVAGIRVICSYVQDIYMVADMLTSQNDITLLEVKDYIANPKPNGYRSLHLVVQIPVFFSDGCKPLKVEVQIRTIAMDFWASLEHQLKYKTEGDVPDSIAAELKDCSDVIANTDQRMQNIYNTLKKDRPEKENMSKNMQGFGMMIQKLKASPKKIVFTEGTDERILEAASRLLASNFLTPILVGKEDEVQAAAEEYGYNIRGAQIIDPENFDRMDEMIAMFCELRKSKNIQPDEARKILSAGNYFGTMLVKMGVADALLGGATYSTADTVRPALQLIKTKPGSKIVSSCFIMVRPSATGENEVLAMGDCAINIKPTAEELVEIAIESAECGRIFGIDPKVAFLSYSTLGSGKGEDVDKMRTAAAMAKEKAPSLPIEGELQFDAAVSPRVARTKCPGNPVAGHANVFVFPDINAGNIGYKIAQRLGNFDAYGPILLGLNAPINDLSRGCNAEEVYSMAIITAALAEMKNMTLENIAAACGGQIYYMREDLAQETAKGVVIDSRQIEPGYIFVATKGERVDGHRFIPDVFAKGALAVICEVLPEEDLGPCILVEDSFMALKQAAAFYRQQLNIRVVGITGSVGKTSTKEFIAAVLAEKYKVHKTAGNYNNEVGLPLTIFGIQDDDQIAVLEMGINTFGEMHRLSEVARPDICVMTNIGQCHLENLIDRDGILRAKSEIFDFMNPEGTVIVNGDDDKLATIHDVYGKAPITFGMNKDNAIWADHIENRGLLGSRADIHMGDVLVHANIPLPGEHMIYNAMAAAAVGVQFDMTKEEITAGISHVEAVAGRSHLIEAGDKVVIDDCYNANPVSMKAAIDLLATAPGRKVAILGDMFELGENERAMHREVGQYAAEKGIDLILCVGGLSSEMYEGAAEKGGEARHFEIREALEAILQDLLQPGDTVLVKASHSMAFENIVQNIQENEMKIVVLAGGISTERDVSLVSGMGIYKALKSKGHQVMLLDVFLGYANEDWKNVFEKDVDWTASVGAIKDQNPDIDAVKALRPDWKKNFFGPHVIDICQQADVVFMALHGENGENGKIQACFDLNGIRYTGTDYVSSAICMNKAISKDLFAAGGVPTPVGIRLKKGETPDVKVPYPCVVKACCGGSSVGVVMANNDEEYAAALEEAFKYDDEVVIEQYIKGREFSVGVVDGKAYPIIEIAPIHGFYDYKNKYQAGSTIETCPAELSEEKTLAMQAAAEQAFKVLRLKNYARMDFMMDEKGDFYCLEANTLPGMTPTSLLPQEAKVLGIEYADLCQLLIDISMRDEMSKTVLGILAHVDAGKTTLSESILYLTGSIRKLGRVDNKDAFLDTYSLERERGITIFSKQAEIVMRGRSYTLLDTPGHVDFSAEMERTLQVLDYAVLVISGADGVQGHTQTLWRLLARYEVPTFIFVNKMDQNGTDRRALMEEIRQRLGDSCVDFSEEADARNENLAMCDEKVLEAYLEKGTVTDEQVRRMITGRKVFPCFFGSALKLTGVQELLDGIAKWTEEKQYPEIFGARVFKIARDVQGGRLTYMKITGGSLKVKAQLRGHIRRRQEAGGEAEDTLSGKDASAGEWEEKVNQIRIYNGTKFETVDAVSAGTVCAVTGLTQTQAGDGLGAEAEQVVPLLEPVLTYRVELPEGSDLHKVLHQLRQLEEEEPELHIVWDDISGQVLVQLMGEIQTEILQQMIHERFGLEVKFGTGQIVYKETIAAPVEGVGHFEPLRHYAEVHLLMEPLEAGSGLVFDTVCSENMLDRNWQRLILTHLEEKVHRGVLMGAPITDMRITLIAGRAHQKHTEGGDFRQATYRAVRQGLQKAESVLLEPYYRFRLELPQRLVGHAMTDIEKMSGRFELGENEGETAVLTGMAPVSEMREYQKDVAAYTGGTGRLFCTMAGYYPCHNTEEVLASSAYDPERDLANPTGSVFCAHGAGFVVPWYEVEDYMHLEGAGLDGETAGAEDEDTVMTAKAKAARSRSIAPSLADDKELEAIFVRTYGEIKRRKPQKERTFRGADTSYSEVSGSSGKMTGGLSDSSGKGSWRGEKKQQENRRQATAQESYLLVDGYNIIFAWEDLHELSEHSMDAARNKLMETLSNYQGYTSQRVILVFDAYKVEGFPGEVTKWHNIDVVFTKEAETADQYIEKTAHAIGRKYKVTVATSDGLEQVIIRSQGCLLMSARELRQEIERIKVEIRREHLEKNQERGNYLLNYLPEEEAERMEAIRQGLISADEADADKRRRMGKFKMENDRLVVTIDDLGAELVSIYDKKYSRELIWQGDPAWWKRQAPILFPNVGKFYGGEYLYQGRHYVQDQHGFARDYVLERVEESPASVTHRLVSNAETRKVYPFDFELMITHRLDGDKVDIQWQVKNTGDHPMYFTIGGHPGFNVPVLPDTEYSDYALKFAEDQDELHFIHIDMNTGTGLPDKVYTMTLTDHKYQLRKDLFDLDALVFDGGQIRQAGIVMPDGSDYLTLLCDGFPNFGIWAAPGAPFVCLEPWCGRCDNFGYEGELQDKPGINSLNVDETFKKVYSIVIGGMESNTENQPVHKRRVRYKGTHPRHYNEKYKELNPEKYGETVEKVIRKGGTPAGMHISIMVQEILDFLQIQPGQRGLDATLGYGGHTSAMLRCLNGEGHLTALDVDAIEMAKTEERLRNQGFGPDILTVRKINFANIDEVAEKDGKFDFILADLGVSSMQIDNPDRGFSYKYDGPLDLRLDQTKGEPASERLKHVTRDEFEGMLIENSDEPYAAEIASVVMQELKKGHPVDTTSKLRELIEKALVRVPAADRKEAVKKSCARTFQALRIDVNSEFEVLEAFLQKLPDVLNPGGRVAVLTFHSGEDRLVKKSFKENVKAGIYSEAAKDVIRPSAEECRCNSRAHSTKLRWAVRSMMKNKKFRIFGITVVAVAALTAGFGGWYFVAGSNNYKNVFYPGTTLNDMNIEGMSVSELEEQLKESAKDYELVVDFKNEQLTIKGSDIQMAYNEASDLQALKDRQNEHKLKETDQKDLALTVNNLFTYNEERVKQELAQCSAMDTTKMIAPENAQLVYDAGKNAFSLRNGEQGTTLDEGEVTAAVEDAIEENVSKLDVEAKGLYKKPVLSEDSENANKILQQANAYLQVELKYPFKKNGEKKEEVINHEQISQWVYIDEDGTLQIDHDKVQEWVNGISEKYSSKKMNMDFTTTSGSVISLNVPVSGETLDTSALFEDVLQCLTDEVSGEREVPYTESASGIKKNFGGNYVEVDLTNQKLYLYKNSELIMSSNIVSGSVSQTHMTPTGVYQVYSMEKNTVLRGADYASPVSFWMPFNGGVGFHDASWRSSFGGTIYQYNGSHGCINMPYEKAKTLYNNISTGYYVVVYGGVTYVPGQTSGSSSSSSKNTEAETKQETETKRETEKKQETETKATETKAPETSAPETSAPETSAPETNPPETSAPETSAPETSAPATNPPETSAPATSAPEEAAPAVEAGEASGAMEQMSEKLRVGILGATGMVGQRFISLLENHPWFEVTAVAASPRSAGKTYEDAVGDRWKMDTPMPETVKKLVVRNVLEVEEMCKDVDFVFSAVDMSKDEIKKIEEAYAKCETPVVSNNSAHRWTPDVPMVVPEINPEHFEVIKDQKKRLGTTRGFIAVKPNCSIQSYAPVLTAWKEFEPTEVVVTTYQAISGAGKTFKDWPEMVGNIIPYIGGEEEKSEMEPLRLWGHIENGEIVKAESPIITSQCIRVPVLNGHTAAVFVKFAKKPTKEQLIEKLVNFSGEPQKLELPSAPKQFIQYLEEDNRPQVSLDVDYEHGMGISVGRLREDKVYDYKFVGLSHNTVRGAAGGAVLCAEFLTAKGYIARKMKKTIKAIAAAAAIGAGIGAVVYFIKNKLYQEDLSDDFDDDFDDDFDDFDDDEEDASSKDSREYVNLHPTSEKEEDAESEPAEDAPEDEPEEDDHSGAEAAEEEMSTEEKELEVTSTEAPKKPARKPRKPVDPAVWEELKAMQESGEVLTVKINAAVNAGVISYVKGVRGFIPASLLSIAYVEDLNEWVDKSIEVKIITVDPEEKRLVLSGKAVEQEKAAAERAAKMDAVNVGDIYDGKVERITSFGAFVGFADDLSGLVHISQMANKHIESPNEVVKVGDEVKVKVIGKKDGKISLSMKAALDADAEVVDNREPAFNYKEEGQAATSLASLLAGIKLDMSEEKKASIKAEVFSWVKVIVSAIIIALLVDFFIIANAVVPTGSMETTIPAGSRIMGLRLYYDFKEPERGDIVIFKYPDDESVDYLKRIIGLPGETVEIISGKVYINGELLDEPYLSEEPTGDFGPYQVPEDSYFMLGDNRAVSKDSRYWHNTYVKKDKIIAKAFVMYWPSLKWLGMNFAIGLIGIIAALVFLTVAVYKGWSILYSSIISVIIIALTNSLNLYEALTVNFVSSFTSYAAAYFILFCEGAMLGKLYDASGAAWKIGKTVVDKCGTKFAIVGYMAVAAILEYGGISTFVICFVLLPLAKPIFKQTKTPWYMWPAITIVPIIGPELMTPGGLQSHNIIPTKILGTNLMAAPLMGTVFTIIYFAVCGLYIAWELKRAQKVEWKRNSLPPVDESENESGHENAPSMVASVVPILAGILLINFANLKPIYGLGLSVILCIILFYRHIEKGKMISTLNEGFSNGVMPLIMVTVVVGIAQVVAQTDAFDVIKSQLLTFSSTSKVATAFSVVGITNIMALICGSASGAIAMTLEMFSDAWIAAGLSPEWIHRIVVTASGGFDTVPWNSFVVLILTMGKLDHKHSYMPIFWVSLVAPILIALLGVFFIMADLKNKRIITVATTGAWPKKENNPNVPLQPEEIAEEIYQCWKIGAAVAHVHVRDEEGNDSMKVETFKKVIDLVRENHPDCDIIFNLTAAGGIANSEEARMAPFKTLKPEMASFDCGTMNWMHMGIFNNNPNFLRNMGTAMQEVGVKPEIEVFDPGMIHDAAYYLKTGYLKAPLHFQFCMGCAGGISATIDDLVFMKQTLERVVPGSTWSAFGVGKGAMEIMYAAIAAGGNIRVGMEDNVVYKKGQLAESNMQLIARARRVIEEFGYEVATPDEARQILGLKKMIKNVTVLGAGTMGHGIAHVFARHGCKVSLYEPFDAVRLSAPKKIREELQFMVDEDYISKKDMENAIANITIYDNLEEAAKNADYAIEACPEKMELKQKLFGKLDKICPPHTVFATNTSSLKLSEMIQYLPEERQKRCMVSHWYNPAYLLPIAELSKFGNMDEDVFNEVYELYVRCEKKPVRVLKDITGMVANRLLHAQAREAFHLVEIGAATAEDVDQALKYGPCFRNATTGMLEVADMGGLDVWLAGEDNMLPALDNSDKACDAMRNLVAEGNLGIKTGKGFFEYPEEKRGQIQMDFYRRLIVQLKASKNYDMKVSRLLLDALETFPNFVIIDKNANVVYLNESYAVLLGIQRDAAIGKPVQSVIPGTRLHLVLKSQKKEVGELMTLFDHTVNDYITVVCNRMPIFRDGQLVGAAAVTTMQNITETISRLHSEIQDIKKENAQYKKELDILMKTQHSLDRIIGTSHQITEIKSTIEDFAFSNLSILITGETGVGKELFARAIHDLSPRKLNNYVKINCAAIPNELLESELFGYESGAFSGALKGGKIGKFELANNGTLLLDEIGEMPMTLQSKLLRVLQEQELEHVGGVKPIKINVRIICSTNQNLQKLIAEGKFRRDLYYRINTVELNIPPLRERIQDIPELCQYFLERYNMQEYKNVKGISREVLELFSQYSWPGNIRELEHVMERLFIISDNKTITLKNCDFLKKRMMIPESHTLKINSTDRCETLAHAVDDTEKERILSALEKTGGNKAKAARILDIDRTSLYYKMKKLGIYKMNQVISIGKQDFASLREGNYFFVDKTHFISEWWESGDDITLIARPRRFGKTLNMSMLNCFFSHQYAERADLFEGLSVWEKEDYRAIQGKYPVIFLSFADVKQDNYRDAIYKIKKIIANVYQQFHEIGRSEALTEVQRRQFMNVTADMDDVIAQSALQDLSYYCYLYYGRKAIILLDEYDTPMQEAYIHDYWDKFTSFVRGLFNSTFKTNPYLERALMTGITRISKASIFSDLNNLVVITATSERYAECFGFTEKEVFQALELFDLGEQKSSVKAWYDGFIFGSKKDIYNPWSITNFLKEGQIRSYWAATSSNGLINRMIQTASSEIKTGMETLLNGGQIEACFDEQIVFEQLDRDENAIWSLLLASGYLKADRVEYRGMTMEPWYYLSITNLETASMFSSMFKSWFGITQSSYNGFMKALLSDDIEAMNHYLNEVIMATFSFFDTGSDCSETDEPERFYHGFILGLIVEQWENYRIRSNRESGFGRYDVMMIPRERSGKHLPAIVMEFKVHNSRKEQTLEETVQAALQQIEDKHYDAELLAQGFKKAQIHHYGFAFQGKKVLIAGESGLMPLIKEKTYTVDDIYALPEDERAELIDGQIYYMAPTTRKHQDVSMELSSQIKAYVRSKGGQGKVYAAPFAVYLDESANTYVEPDISVICDKNKLTDKGCKGAPDWIIEIVSPASRRMDYYTKLVKYRTAGVREYWIVDSDKDRIFVYHFVAESAEEESMEEYTLKDSVKAGIYDELVIDFGDMDVEMNVNFEYYRIFYYVAKYRNFTKAARVLGNSQPNITRAMNCLEQQVHATLFIRTNRGVQLTSEGEELYNYVSAAMAQIFAAEEALSENDGLLYGNIVIGTSETALNIFLVDQLKSFHQSYPGIRLKIYNYSTPQALEAVRSGKVDFAVVSTPVETAGPLKVTSLASFQDILVGGRTFEHLTSRAVSLSELKEYSLMGLGRETMTYKFYNRFFMTHGQEFAPDIEVATTDQILLMVKSELGLAFVPEPMTRESLKKEEIVTIQLQEEIPIREICLVYDYQHPLNSAARQFVTMCKNMEEKTIFPREEHSDILFQKILNDPWACEKLQATFCDFLFCNDEFDHPLSPEEFSKALFESYKNRDLSAFLMGICQNTIFDLLRNSFLIPYRFNADGKQNPIIMTDEKGLLLPEYDNPFYKKEYSTFQKIYHDLESDRNIFLAQAYRYSHDYGPNHMNIEQKILEITTGILLIRELPDTVKLKETEAEAYAAVWDIMIALEKELPMAYVFYGQDTLVEHNKRYDEIGIFLPNSHFLKHLEKHIEKAEAIIYAQKMRKNNTASAPAASYVDIMEKNHMEIPWHDYADADSHVIISQAGLIEKSSVIGRVGLIMLSCGTGAWRVRTSMNRLSRELGVTCTVDVGLMSISFNCFDGKDCVSQSLSIANTGVNTSKLYRMEQFVDSFPTMEAKLTGEEIHKRLDEIEEIHGLYSPVKLGFAAALACSAFTFLLGGGPVEMILAFIAAGIGNFIRTKLIKHHYTLFLNIAASISAACLVYALLLKLSEVCFGISSFHEAGYICSMLFIIPGFPFITSGIDLAKLDLRSGLERLTYAIIIVLVATMFAWIMALLLKLKPVDFAAMNIDPLLHMFLRIITSFCGVFGFSIMFNSAIPIAATAALIGAAANTLRLELIDFTQMPSAEAAFIGALTAGLLASIIKRNHGYPRISITVPSIVIMVPGLYLYRAIYNLGIMSLNESVSWFAAAIMIIAALPLGLIFARILTDRTFRYCTMSFKHHKQMSESFLTAAFLSVSGGLQDAYTYIFRGKVFANAQTGNIVLLSQSIIDKDFVRAIHYLVPLLFFALGIAIAECIHIKFQRIQHIHWRQLVLVLEILLLLVVGFLPTRLNLLANAMVSFSCAMQVQSFRKVNGYAFASTMCIGNIRSGTDALCAFIRTRDKNTLRKSLCYWGIILLFAIGAGIGGYGITIFGMRTIWISCMLLLIGFLMMFIKEEQTEHMEPMTLMENTMTGRNVGKTCRTHYRGTFNDGTQFDSSYDRGEPLEFVCGAGQMIKGFDAAVADMEVGEIKEIHLMPEEAYGMPDPNAIIEVEIAQLPGSEELTVGQQVYLTNQYGQPFLVKVTDKDEKMITFDANHEMAGKELNFKIELVEVKMHLKKFFSAAALLGCLTMIFTGCSQKSSGLTPVTLSEVAHSIFYAPMYVAIENGYFADEGLDITLVNGSGADNVMTSLISGDADIGFMGPEATVYVYNQGAQNYAVNFAQLTQRAGNFLVAREEEPDFTWQDLKSKTVLGGREGGMPEMIFEYVLTLNNIDPKNDLTIIQNVDFGLTAEAFASGTADYTVEFEPFATSLEMNGNGHVIASLGEDSGYVPYTCFSALESYIQAHPDIIQAFTNAIQKGLDYVGSHTPAEIADVIQPQFEETDTDKLIAIIDRYAAQDTWKEDCIFTEEAFNLLQNILDQAGELTERVDYGTLITTEFAEKAVQEMNFEKINNSQWDMNYASVSFVIQWINSTGHLDIVDMGWSKNLILRRLTAVIKTQFISPTNQIYEKYLVKNTTVKERKRYVEKLNGRWYSITAPFNGYIKGKGEIDEGFKLIWRQFLQEEKKKLEISDVRRQSRVSRAFDEIGEILAAMTENCKGQEKDSQNSCDEFVERIRAVSAGKSEEAFVDRLISFYCYEIEKAYANRDMALLEELTMDWCPNGLMHDFVWQKIKVAGQMGRMEWIKKIMIIVLGSMLAAYGITLALYAGFGGATLAIVWQGMSKTFHISIGMASLIVALIMIVFVFFYDRSQLNIGTILYQLVYSFCVDLFADAHVYSSHLWLNAVIMILGVMLFAVGTGFYASASMGRGSYEALTFSLAEKNHWQVKGVRMILDVLMVIVGVVLGGKFGICAIATILFSGPVIQFTTAKTKKLLAIMKLDKTCTVCMILLLTVLLAACGRGSNQEAASEKPVDIVSEVAEAVNSEPETTAMDETVQKNYKVLLDGTSDQEAVYYLMDVTGNGSPELIVGKEAMSVYSCNQGAVTTIGAMAIDTAYLSTKYGFLAFNNQNDKYELVQYKYDGEMITETVLVSASSEADYKSQADQYLADARELKAYALDDRTPFGDEAAEMIKRAEDMVKLYNEHMRDGDGTVEIIRYLEPEEFNGNAKMIAKLVLKPGCSIGEHTHEGEEEIICIAKGNAEYNDNGTMVTLHEGDSCVCLGGQTHGIRNASETENLEAFAVILLYMEQGNDIPSVIEEVFKRYSDGSYIKASMLPDLDLYVDQITTFLTRHLAKTIRFEDDKIMTKTMINNYTKNHLLPPPDKKKYSRDHILLMIFIYYFKNFLPISDIKTILGPLTDKYFHKDADLNLEAIYTTLFSKEDTFVQEVLENVMKQFHMSADLFPDAPKADQASLREFTFICMLSLDIYLKKQLIEAILDKKMNKKIKTPEVEQLFKGMLCLKSVEECYEFFEDICTINELLSLSQRFEVARMLREKKTYLEIAEKTGASTATISRVNRSLNYGNDGYDMVLDRLNEEMKNAKLTDKTDNYRILSVYIDNIMRKTENHEQQTRLVFDCYTIVIVRSGKIHIEESGQQMILRKGDAIFIEKGKMAIGKALKGDECWIMIIQFDGEGVPGMLQYLHIQDGERFNVSGNVLAAELDSMIQTWEAGEYFRASVMLQSLFLTIHDIRGTDYRSLDLNTIYEYIQEHYAEPLDLNSLSQLYGTSISYFSRAFKQHFGTAPMTFVNEVRMHYARLFLTTTEMKVQEIAGYCGFEKMEYFCYVFKKVEGCTPSQYRLNRWHADKNPCTADRRLEMESDGNLMLKKISNGCVHIVQRYLPDPFIFCIILTIVVFIAAIPAAGATPLQVVGFWGTSIWSLLAFSMQMALVLVLGTAMATAPPVKRLLDKIAGVAKTPFSAIVLVTVVGTVASWLNWGFGLVVGALLAKSIAKKVKGVDYRLLIASAYSGFVVWHAGLSGSIPLTITEVTEAVTAATGGALTESIGMDRTVLSPWNLIACLIILILMPLLNAKMHPAANEVVTVDPKLLVEEEVTVRKASTPAEKLEDCKPLSWLVVIIGVVYLVQYFAAAGNPLNALNLNIVNLIFLVLGVLLNGTPLNYVKAVNDAVKGAGGIVLQFPFYAGIMGIMTGTVTEGGPSLAGVISNFFVAISNDVTFPLFTFLSAGIVNFFVPSGGGQWAVQAPIVLPATIKMGLDPAVSCMAIAWGDAWTNLLQPFWALPALGIAGLGARDIMGFCIVDLILSGIIVCITFVVVGLIMKRILLMVLKLLGHVPVWFWRICSFAKDTEEQRYSIEEKYNYIREIAIKANKAGRVTIVSSGEENLPEEDGYILYPNHQGMFDVLAFLETMKRPFSLVFKQEVKDIILLKQIREALHYIPMDRSDMKQSMKVILEASNRVKAGENFLIFAEGTRSRNGNETLPFKAGAFKAATRTKAPIVPVALLDSYAPFDRSTTEPVTVQIHYMKPMYYEEYAGMKTTEIALEVEKRIREEIHKRMKAEMRSQKIFEKACELMPGGVNSPVRAYRAVGMTPPFIFRAKGAYIYDVEGHQYVDYVGSWGPMILGHAKDEVVKAVTAAAIKGTSFGAPTNGEVELAELIRTAVPSMEMMRMVNSGTEAVMSAIRAARGYTGRDYIVKFEGCYHGHSDGLLVKAGSGLLTENVPDSAGVPKAFTDTTLIARYNDLDSVRKLFEQYGDKIAALIVEPVAANMGVVPPEDGFLQGLRDITKQYGAVLIFDEVITGFRLALGGAQSYYGVTPDMTTFGKIVGGGMPMAVYGGRREIMDCVSPIGPVYQAGTLSGNPVAVAAGTAMLKLLMEDRAVYERLEEKSAGIEHAFKSAVEKYHVKAQVNRVGSLMSIFFTDKPVKRFDDVRTSNLAQFTQYFRVMKAHGMYIAPSQYEAFFVNDALSEADLQKTESAIDAALSQSFDQCMNLTRRPRRLRRTAQIRNLVHEVDVRCDDLIYPVFVTEGENVQSPIESMPGIYHYSLDRLAIHLKEVWEKGVRAVIFFGVPDHKDACGSGAYDPDGIVQRALRMTKKLYPEMICIADICLCEYTDHGHCGVIKDGEVLNDETLELLSKAAVSCAAAGADIVAPSDMMDGRIGHMRHTLDAAGYAHTLIMAYSVKYASAFYGPFREAADSAPAFGDRKSYQMDFRNRREALLETELDMEEGADIIMVKPALAYLDIVRTVSEAFDLPLCTYSVSGEYAMMKAAAMNGWIDEKRVVMESMIAMKRAGAKMIITYYAPQIAEWLREEEGQRMVQTEMAAEAIKKVFPSIEIEIAGFETKGDLHLDKSLSAFGSKGAFTKELEGAMMDGRIDLAVHSAKDLPVELPEGLTVGAVLKRGDSRDVWVSLRREFSIIEECKEKTVVGTGSLRRALQIQQICPSVDIRDIRGNVPTRLKKLSEELFDGIILAAAGLKRLGYLSDACDETGCFEAEGQTFFYEILPKEQFFPAAGQGIIAVETRQHDCEECMQAIHDEQTWQMFLAERAFLKAIGGGCNEAAAVDTAVDEEKMTVRARYAADGAHMKEISVSGTRYGDRMKDRQMAVDLGCRAAQKLQSGKVYLIGAGPGDTGLITMKGIEALKEADVVVYDHLASSSLLNETKDAAEWIDAGKFAGHHRMKQAEIEELLIEKAMEGQTVARLKGGDPFIFGRGGEEALALAAAGIEYEVIPGVSSAYSAPAYAGIPITHRGKASSFHVITGHEDPTKENSSLDYEILAREEGTLVFLMGLSKLHQISERLIANGKDAHTPAAVIASGTTARQRCVTGELGRIAAISEKADIQPPAILVVGDVVSLKKEIDWQQAGSLSGKKILVTATEIIAKPLAEKIRKLGGEPVVMSLISVRAEKMYGLKEVLVRPGKRWLVFTSRNGVRFFFEQMKKEQVDIRSLGDSRIAVMGAGTRKELENWGCYADLVPEQSCSESLAKALCDNVQYDEEICLFRAEEASDVLIKRLWEKGFFVVDTPMYHTEKMWKKASLLKKVLEDMDAVTFCSASAVRAFAQMTEGQRFAAKNVCIGPVTAEAAEKADISIDKIAGQYDLEGLTAALCDILCRNESMADFPLFIKMDGRKVMVIGGGSVALRKIRILIEYGADIRMISSKITDELKLLADKKYIVWTNENLTEHNLDYLAEAFLVICASDDKALNKMAADYCQMRHILVDCANPGEVSDCVFPSVVRRGNVVVGISTSGGVPALTKHLREKIEAVIPEWYGELEIELRQKRRELKMSGLGQSNRKKYLRQWIAKEEKIREEGKGQYENRNEEEPSGHGADGNGGGGHMNIQLIGISHKTAPVQIRALFAFTDENKKELMTRICTQKEIRECVLLSTCNRTELYTVSEENISVRSVMTAMQRIMLDMAGIGDEGEVSEHLRFYQGTQAVRHLFYVAAGLDSMVLGEDQILGQVKEAHRTAMEDGFSGTWCNSLFRMAVTAAKKVKTETKLSGISVSTATLAVKAAEMYFGSLENRKILVIGATGKIGQIMMKNIAADHHVQLYAASRQLKSGEKAVLGTDTLSDGHGTRHQQTEEYVQIAYADRYRLANEMDVIISATASPHYTLTKEGWQSGVIQKHRRILIDMAVPMDIEAGIEDEENSLCHLDELTSLSEKNQHLRFEAADRAREMLEEDIDDFRRWALFQQNRPLMDTFREHLLADMAANPEKGLNKFFYRAREAADTEQLEMFFEVLRQSEEARENGMTRLYSIGDVHEMTGLSVSALRYYADMKVVCPVRIDRQTGYRYYDFDDIQRLKTVGYLKKAGFSLAEITVVMEAASEEERRLLMSERMEQTQKQMKRLKERMSMMEWLTSQNPAPEAGHESYRIHQKQMDSRRVWMTETAKPCEVEDFYRQTGVLMAEEMADFQKMRGYLLEETAFMEGKKLAIEGSFISGGDCVSAEKNQSILPKGNYICMTTAIFREDKWIRALSRYFVEKDMRPRIILAVLKHKDFYNWRHSLYEVQILVMFRNYLDKLERDEDVRKNLIELRKLLKTEPGSAAWQRDRQRCLSLMLKLLKHEDAKVRKNAALILGEMGCQDALDALFYAYECEEKLFVKSAYLTAMSQLDYRTYLNAFRERMEELMQMEMTPENQKHLNEELKLLRDMLLIVEKPVKHTFTGYSVPSEMILLTSPGMEQLTIDVMPRNVRDAAKAMRGGVRILAERPGELFGIRTVKGFMFRFCANPLKATDYQAVAAAIHDAGLTDYLKKRHEGDGPFYFRIDLRTKLVLNEKSQYVKRLGAELERLSGHHLQNSASNYECELRITENKQGQYSVYLILHTIADSRFSYRRNAIATSMHPVKAAEVVSIASEYLADDADVLDPFCGTATLLIERYRKRKAAHLYGVDIFGEAIDGARENASLANVPSYFINKDFAEFSHSYTFGEVLTELPAGSDKMTPDVLFTLYKNFVRKLNTWMTPGGYVIVVTTEKEWLLSLAAKSGYLKEEKEWALSGKKTQYVVVLRYRGMNKGTVKWFNNQKGFGFISDEQGNDVFVHYSGIQSNGFKSLEEGQEVEFEVIEGQKGPQAVNVVKLMLFWKCVGPLKKMAKKGHFCDIFKPFGIQEYRNSFDFMERPDLLKAGDEVEMSESKLNTLAGTMYYYTIEPALAMSDNIPALRRLTSLHATVKEVKYENSVYTVVAYCEMRAYERLLNYVVVHTASDEFSETTPTTQRQFDLANMLVPEMKALGIEDARVSDLCCVYGTLPATLGYEDAPAIGLIAHLDTVPDFCGEHVKPRIIENYDGGDVVLGDSGRTLSPAQFPHLPSLKGRTLIVTDGTTVLGADDKAGIAEIMTVVEHLIKENIPHGKICIAFTPDEEVGSGASALDLDAFGADYAYTIDGGEEGEITYENFNACAAKFVINGFNVHPGSAKDTMINALNVAWELHQMLPAADRPEHTEDYEGFYHLTDMSGNVEKAEMQYIVRDHDLAAFELRKKELQHIQTVLNGRYGEGTVELTITEQYRNMSEKILPHFHLIENAKAAAEEIGLKPLIVPVRGGTDGAQLSFRGLPCPDIGTGGYAYHGPYEHITAEGMDLSVDLILGVLKRYASFKAGEMSEVINNMKTRRSIRKYKPDMIPEDVLNRIIEAGTYAATGMGKQSPIIIAVTNKEIRDKFSKMNAEIMGVDSDPFYGAPVVLIVLADKARPTYVYDGSLVMGNLMLAAHAEGIGSCWIHRAKEEFESAEGKAFLKSLGIEGDYEGIGHCVLGYTDGEEPKAMPRKENYVYCVKMNLMYVAVICAIIGLVFAFVLTKRVNSVDAGTDRMKEIASAIAEGARAFLFAEYRILAIFIVVLFVVLCFLRNPLTAVCFLCGAVLSIIAGYCGMTVATKANVRTANAARTNGMNKALNVAFSGGAVMGMCVAGLGLLGVAGLYVITGDADVLFGFSLGASSIALFARVGGGIYTKAADVGADLVGKVEAGIPEDDPRNPATIADNVGDNVGDVAGMGADLFESYAGSLISAITLGLAGSFGAITLDTAKAAIFPAILSALGIVASVIGTFMVQGKEGGNPQKALNRGEYTADAIVVIGAIALSVYYLGSIMPAVAIIAGLIVGLIIGIITEVYTSGDYGSVKKIAEQSETGAATTIISGLAVGMQSTAIPLVLICVGIFVAYKCCGLYGIALAAVGMLSTTGITVAVDAYGPIADNAGGIAEMSYLDESVREITDSLDAVGNTTAAMGKGFAIGSAALTAMALFMSYAQQVNLSAINILSYTTIIGLLIGGMLPFLFSAFTMESVSKAAYSMIEEVRRQFREIPGIMEGKSKPDYTKCVDISTKAALREMIIPGVMAVVAPIIIGFLLGTEAVGGMLAGSLVTGVMMAIFMSNAGGAWDNAKKYIENGNHGGKGSEAHKAAVVGDTVGDPFKDTSGPAINILIKLMTIVALVFSSVFIGILNMTFEKTVTLKDGRNCLLRNGVTSDGKAVLDVFNRTHEETDYLLTYLDENCFTASQEADFLQRKTDSANNVEIIAVVDDVVVGTAGIDALGMRDKIKHRAVFGIAITKEFWGLGIGKYLMEACIECAREAGYLQLELEVVAENERAVEMYRRAGFIEYGRNPKAFRLRTGEYQELIDMRLELKMGKPTGFLEYERETGGVISPEERIQNFNEFHIPLSSEMQQKQGARCMDCGVPFCQSGMMIGGMVSGCPLNNLVPEWNDLIYNGNWEQAWRRLMKTNSFPEFTSRVCPALCEAACTCNLNGAPVSVKENEHGIIEYGYEHGLMKADPPKVRTGKRIAVVGSGPSGLAAADQLNKRGHQVTVFERSDRVGGLLMYGIPNMKLDKAVIERRINIMKEEGIEFVTGADIGNNYKASRLLKEYDSVILACGASNPRDINVPGREAKGIYFAVDFLKKTTKSLLDSNFEDGNFISAKGKNVLVIGGGDTGNDCVGTSIRLGAQNVIQLEMMPKAPDQRAESNPWPEWPKICKTDYGQEEAIALYGHDPRIYETTVKSFVANDNGEVCAAELVKLSWQKDPESGRMVMHEIEGSNEIIPVDLVLIAAGFLGSQSYVTDAFGVEVDGRTNVKTEPGHYHTSEEKVYVAGDMHRGQSLVVWAIREGREAAKCVDINLMGYTNLDMEQQKKPALYDPSFEHDACGIGAVVNIKGIKTHKTVEDALTIVETLEHRAGKDAEGKTGDGVGIMLQISHRFFKKVTEELGFDIGEEREYGVGMFFFPHDELRKNQAKKMFEIIVAKEGLEFLGWRTVPTNPSVLGQKALDKMPYIMQGFVKKPADVAKGIDFDRKLYIARRVFEQSNDNTYVCSLSSRTIVYKGMFLVGELRKFFDDLQDEDYESAIATVHSRFSTNTNPSWMRAHPNRLIVHNGEINTIRGNADTMLAREETMSSGALKGEMHKVLPVINSSGSDSAMLDNTLEFLMMSGMPLPKAVMITIPEPWENDKSMSQTKRDFYQYYATMLEPWDGPASIVFSDGDLLGAVLDRNGLRPSRYYVTDDDYMILSSEVGALPVPEEHIVLKDRLRPGKMLLVDTVQGRLISDDELKETYAQSQPYGEWVDANLVKLEDLKIPNERVPEYTRDERIRLQKAFGYTYEELKDTILPMAKNGAEPIAAMGVDTPLSVLSNQPKPLFSYFKQMFAQVTNPPIDAIREEIVTSTTVYIGPDGNLLEEEAENCKMVQIHNPILTNTDLLKIKSMNIEGFKVATIPITYYVNTPLERALDHLFVEVDRAYRDGVNILILSDRGIDENHVAIPSLLAVSALEHYLVRTKKRTAVAVILESAEPREVHHFATLLGYGACAINPYLAQESIKELIDLHMLDKDYYAAVSDYNSAVLHGIVKIASKMGISTIQSYQGSQIFEAIGISKEVIDTYFTNTVSRIGGITLKDIERDMNTWHMRAFDPLGLDVDLSLDSIGGHKMRSGKEEHLYNARTIHLLQESTKRGDYEMFKEYSHNINEETRLMNLRGLLEFKFDEEGGIPIEEVESVDEIVKRFKTGAMSYGSISQEAHETLAIAMNMIHGKSNSGEGGESLERLTIGPDGLNRCSAIKQVASGRFGVTSRYLVSANEIQIKMAQGAKPGEGGHLPGGKVYPWIAKTRLSTPGVALISPPPHHDIYSIEDLAQLIYDLKNANRSARISVKLVSEAGVGTVAAGVAKAGAQVILISGYDGGTGAAPRTSIHNAGLPWEIGLAETHQTLIMNGLRSRVRLETDGKLMTGRDVAMAAILGAEEFGFATAPLVTMGCVMMRVCNLDTCPVGIATQNPELRKRFRGKPEYVVNFMKFVAQELREIMAKLGVHNLDELVGRSDLIKVREDVDPQIYGKLDLSAIVENPYLHEEKHLFMPEDVYDFGLQKTIDEKVFLKEFKSALAGKKKKKIEINVRNTDRTLGTIFGSEITKKYGDTLPEDQYTVKCNGSGGQSFGAFIPKGLTLELCGDSNDYFGKGLSGGKLVLYPPKNIKFESNENIIVGNVALYGATSGKAYISGVAGERFCVRNSGATAVVEGVGDHGCEYMTGGRVVVLGRTGKNFAAGMSGGIAYVLDENRDLYKRVNKELVSIDTVTSKYDVMELRDMIQAHVDNTGSAIGKEILDNFSEYLPKFKKIIPHDYSHMQTAIVHMEEKGLTFDQAQIEAFYASKRGMGFLPIFKMYFPDELLYSWLWRLAKMNHLSMSNFLESYCSVSKAKYLKPDVQNEWVSLHGFLYRNVSSIDTYLDTSTFCFELFGMSQERQLKKLQAVFWPADKLNRSWYPFFTTLKICPQCIAEDEVPYIRKSHQLSGVCTCHKHGCHLLEYNGKPGNEMNFNLEDYQECQSEIDIEILRAYTSYAVKLLEAKIWTNLESVRSLLLACIERSGYNRKNRQKWIDEFKKWQYAALFKGDINLFFQKNRLPQIMSSILPVIMYLYPDPNDFISAIPYEEPLTKLYECQVCGKEYISMPFYQNNGWGCPYCNKKKSIPVRLEDIFSSMHQGEYVLESEFKNLSDNVIIRHKTCGERLRVTAGDYLYGKRICPCADHKREIQIKTKIESHKGFKLLKYESDTSIVHILHEKCKKTFESNYFYFAQKPRCPFCYPVAKLIDKYKIRIAELVGNSYSLVRINAKTKKVVIRHNKCGCEQIYDIYRFEKGQRCKKCMELIDWRVVQDLLDVFSEHRYRIMKCKGNWCDILDQENGNTWKMLTIHIMQEIQRPTPSEIFSFLPANQIDLSKVAFSRWDRNYMLLCEYKEKFGNMDFSKKAKYKGINLRNWVSMQRVQYKNHKLSEEKIKKLEKIGFDFEVSENQWMRNYEAYKQYIETLNEKNVIEYDAVEVNRLKTWINSQKAQDKKLKLSSKRKKMLEDIGVDFTYKWMMKKNFEYIEIEEGKSQYEEYDLTENKTVDAIYVRAKLEIDQGNKYIEALPFPRRHEDINREYKRILVGYKKDDVKKMTKFDKMMQISTLNELRMPLPFHRALEYDFYTVLCMSYRSRRVMYASNQELTYTVENEEKCINRILTGDPADATKAGLSMIGYSGAGKSSALSILLSRYPQVIMHDDGNGGCYPQVVYLVVNCTANSNFTVLYEAIGAALDRALGNLLPVYATEMAKGKNLGKKAEKIKQYIEMFSIGCLIFDEIQLIDFEHTRENSFESLMLLANQTKVAMVIIGTEDARDKMFVHLRTARRIGQVIDVNRYCNNKEFFAFLVKQVFQYQWFDDTVPVTEDIIDALYDVTRGIVDQLINIYMCVNYDYLERKTKPEINGKYIRNIAKKYYPGIQDLLKMIRTPDQDKKYEEIKRNARDRIQELIDKESQDREMQLIQSDNSINEDDIQLSNVAANITAIYDEYSEIQIMNAYKQVKRNDAANGKSEKEITRMVIDRLQKKNNAKQKSKNKPIFTDRTQMENFLKLSMTEIIATVGMVMNDRVTGTKYRIIYISNEKVVVCKMEDTKLILLEYDQELIIQFLAQDGVELYQDESKVFDISSFTDSVRSKYEENRKIMYEIEKEYGPDYMELMGRKKKKVLYEIMEKYHISKSKIWRIIRNYLQSGMREYSLLDQKVFVLQNKKEKRYSKKPGKQSKYLESAGIIVTEDIKEIFDWGIKEYKSGRWKSFQSVYVHMMRVYFSSTDVIDGEQTIRLKPESERPTFYQFYYYAHKRLTRKEINRIKTSAEQQRNDHRLLLSDSLDGVKGPGDLVEIDACEVDISLVSEVNPEKTVGRPVVYFMIDVYTRIILAVSVSFDNNSALGITNLFLNLSDNKHEYCARYGITYTGDDIWPSNIIPRRVRVDRGAEFKGKEFDRLCIELGIEKQIVPGAMGSLKGVVEQSFHRLQSEQREHIENHGLIEKRYDSHHHKEASLNIRQYTAMVINYVLNHNQTYNEYYRTTKNMQQKQIKPIPALLWKYGVERYGHPRPISDIEQYRYRLLSPVKAKISRRGIEYKKLWYFPSDDDELLRKMFELGNKREVFIVRIDKRYVGAVYYEKAGKLAKVPLNTRMVGNQEFENYTLKEWEDYLKSRREMDARGRVYNHNVKAYAQGVNESIVAASIAKRQMAVSDEKSIREEREKEKQRVSRQGKIEIAKNLEVQNQQLQIAEDDRGKKNKRYDDMNADDAMERFWEMEELKDDEEEFMARRLSDETKKKRKMGTGEGKDYIPYITTSEFNSRGTTSVIKDWKTGRGVHCLSQGETLWYYILRWDDNNVDIREQYPLDVDKTVAIAEEMGIQYPRNKAQVMTTDFLVTEADGTLHAYSVKSDEFISERKLQLLCIEKMYWNKQGIKFDVLLKRNVNKVLAHNIRLVTEFYDSSYVFDWYSAFKHKIAIKELKIDIEHAELTADMARQIIRYMSDTENTQNQLSNIEAGQIELLTERIISNKPSDAEIIYNKRKHLGLTQKEFADKIGCSLSTIARIERGISPISANTQRKLDALDVQKPKELPLEETFSQSLSKIIIRNGYNSLGALYNIQCITDNLIKMFSPPKMDKDDARRYLQFLTLTIDYATRLCFEEQQAIKKKQAVLFSKQTAGSLAYIQRADRNLFNELQKINSETPEKKMSEKMLVTQALDERDLLVKKINDKIQKASFVDTIKPNVELVYNKRIKKEEFNQAASSAYQQIIDLIARFQTIDAAIINSNANTKITTSYGTYTVAAAISLRSRMRNMGAYDNEANFEDRLRNKLMQEYSSRVCVCDKENAKLKETADSMRLSILGKDTKVKEDKPLAVVDAYIKENTTELVDPLSVEKLTAKLDEKRDKLLSELDTQIKVSNATTFIEFMLLSAGSKLPTGSKCFEDYKPSPCFFICILLSFNKEIFNHQLMKTVKEWLNEINIQKLIGYYQTMYPAYLDDTRLDEMMTIRQCRDLERSKLPSIQMHIGMLSPLIKREIFKEAKRCHYQVPSDYEKILEKAQKVNTISDDKIVFSWLYNSDSVLNSSSMVPHLILCNKRWAIRLVFFNNEDTVNAFFITIGHELTHKEKDYFSWTLSITDYKFMLQIGEVHADYGAAEKMVHSSKQKLLESVRYKRALKKKDEEGFIHPSWDKREYYIEHFDFDEKLIRQIAADVGCSNSKLIQKVCNYYKRIVLKMVLKVIITALQVINMLIWFWYTLMEILFLPKAIKKEGYFPYIWTFAVCITMVSAFLLTLSCYRDSFNIVSVIIGILSFIILIYITGGILLSTGLARPSEEVQLPLVRYYLVFIAFWMVIKVIAMEFDEEGMNVFKQAVDDFIAAGESASFELAGRVLAAARMAVDAVEDFQDEVDELDEEGLAEVEKLAHEFLSSEEDVPDWEFSRRMKRAMHWALTGLYDDEDEMVENLMKVIERILDYRLSRDKAMLEYIYGYRNQIKYVVFVYSSGVEVIRVENIPYITNPLPWQYTIKDKNVKHIVSNKMIIKNTMGFFDLFKQSNINQGIEEYKMTDDAVLLDVRTPQEYQEGHIPESKNVPLQQLENIASVAKNKDIPLFVYCMSAININKNNFQNEVLNSDKPVLLDFWASWCAPCRMVVPIVEEIASERRDIKVGKINVDEEPELANKFSIMSIPTLVVMKNGKIVQQVSGARPKNAILEMLMYHKQFAVNGLTVSLARELGPKGIRVNAVAPGITETDMMKAVPKEVIEPMIERIPLRRLGQPEDIANAFVFLASDEASYITGVILSVDGMARSFEGYSYQHVKLPPAFSREELESLEFVPGQKNLVLYGPVGVGKTHMAIAAGVKACNLGYKTKFYTVTELVLKLAESRKNGTLEKLLRDLRSLDLLILDEWGYVPVDKDGSQLLFRVISDSYESKSLILTTNLEFSKWGGIFTDDQMAAAMIDRLVHHGHLLIFEGKSYRMEHALMRQDAMNLVQQFQNLFDPSTALGAFLISLLAGVVCSFLLGRKYQKEIDKKNIIEAKKANSIIQDVRKTGKSDLADEKVKKSNSIKVGTVTGTIKQDVEEMLKYAFDKIKGLFRKNGKQNSIEVGTMENGNIYQDSVVKIENPAIAISHIKDNPEDLKITLDSISNVLLKPGKALPQGYQVVVNMKDGKSDIHSEPLNEEARERYPQKVKATAKIVIPVGMSFQEALNRARISQTPINVEMLDMQKMIGDNIDPYQEQFQKEWRENIFKIVPEELPAGMNCVIGIDGIPYRYDTVMRIQPVDPDAGIIKISNEEYSTDFVLALTYHVDTRATDFTYRFSGKSWKSIYKFFNFMKAAVPGNRLFVCVTEQKQDLFSVKLNRILFDDEYDNINYNIDIAKRLLMIENQYGIQFPTDQEPSDEDIELIGFLSNSIMNKPSGFTWDNFNATANFHVIEPDGINSDARLEFKETVSITILGQKITDLLVSVELESVRIANLDSIKEAVKTHKTEQIQISLVPGNRGNHGTRIVLLMPRTKGSKKRPKTTHTDYASQIAEKQETVASLNTEIASITTNIDTLKADLKEKKTALKKAEKEVAKLEAKKAKADQKAAEEAKKAEAESVVKKLLASGVSADEIFEKLKMNLSKIHHIAIIVSDYEAAKDFYVNKLGFSVIRENYRLERKDWKLDLRVNEHTELEIFAEENPPKRVNRPEACGLRHLAFCVESVEQTLKELAEVGIECEPIRVDDYTGKKMTFFHDPDGLPLELHEMSKMKKTRKPGGGRKKLKPEYDAGKNLKEQMDAAVALYDSEMSLQAIGDELGLNPIKVRKLLITAGVYESEVAQKVQDTFEEYRKTKDYKTSVLSTANTLQLSKASVTSYLPYKKGVYFPSTEKEKISVGAERQRRYRAMKRWRVHPTEENFWGVVLVYAGVKFKTYSGLPFTYEVRKGRSGEYTKELWIDRREKSKSLAWSSIVLALKNIKGEVVDRPKALGDIRGVTYIYGMFYRFGLIDVPDEVKEKMGHPKKRKKMENLLNLIYEHYTENNPVEKNIVAGKAAKAKEKELEEWLRGLEGMDRLVDDYVGDKIPFWEKIMDRQGMVCCTWEKNAFEEGLKVGIRLMMEAHSLMAGCFYTGCKKLMKAHKYFACGSLVCMGMAIYSGHKIAPKKKKAEKPEEMTVESPGQLPGLVGPNNMHEMHFSRNPKIIEFLHVYEYVNVYEYVKEFGEGVDRMYREMEDAGLPDQEYHVSSFMLCTTLKNQKWVAAHQQAGQLPPPHDAPHDEATVEDKILAFCSVPRSRDELLEYLKLSDRKNLRTKYLNPLLASGQLKMTIPDKPRSKMNEVAGMLAEKYGATADEIVAAGAMKLYLQSMEPAETLRKVRAVYEPKVIWLDSGEGVPVMKTTLLIMAAGIGSRFGGGIKQLEPVDDKGHIIMDYSVHDAIEAGFNKVIFIIRRDIEEEFKEVIGDRIAAVCADNGVTVDYAFQDIRDIPGELPKDRTKPWGTGQAVLAAKELITTPFIVINADDYYGKEGFQAVHDYLVKGGKSCMAGFVLKNTLSDNGGVTRGICKMDADNNLTEVVETKNIVKTADGAEADGVKLDIDSLVSMNMWGLTPKFLNVLEKGFAAFFEKEVPANPLKSEYLIPIFIGQLLEKGQVAVKVLKTNDTWYGMTYREDVEAVRESFRKMLAEGVYTEELFGDLEDKMKAFSKVEFYDRVLWKNYLAVIGVVGTIVTLISFFVTAEEIDRFSEKQLAAFLVAGLVLIFSVMWYSANHRKHAVKMINNTIVRIAEGDIFELMERDPDKRIDELSVIGANDFYDTLVDDRIVARKTLHGQYIEQIRKAGKLKQLESTIEQDALLNKPEHCQCVPGRQAGRKVRYPLGSVVEFENYVLTAFTKFDEDNKAYLSAEEYVGFWMQFWKNIDEIYAGRTLNIPLMGAGITRFRDGKPSKQELLEVMLWTLKISGFHNTYSDGKVNIVIYRSDVKDIDFYHIQHNLSLEMDILEDKVICQLIQSLKVRLRKKTISSREQPFLSAPRLIFVCGKEWVDSEETIRNYTIRTLRKCRIANHYGTQNEAVLCIIAEKLYVQDLSEDIFSFEKMLAEISDRIIIVAESPGTFCELGAFVMDEDCRRKTMVINEDNADYENSFITKGPIKKLESLNESSIIRHNGLERIKNSHEYNFKVQEIAKAPLTIAINDNAGAVELKSLIYELANIVELFQPVEYFEIETLYKRLKDFEGYTIKNTADHKIRSIRQVLSLMEKMDMLLRQDGYYILNKNISCYNVMFRISRKEFNDFRIMYLNRLNKCQKSRVDVLMRLSERIAKGIGIDESYVTIIASRNNLYAKYYIPKKNGRYRLILQPSKELKVLQRWLLRNIFAYFPVSEYSSAYSKGNSVRKNAAVHKEGRYLLHTDITNFFPTISRTMLKQYFQSNESLTRKLGMADEDIELILDICLYRGENLVVGSVASPQIANMLMYAFDLELKQMLDGFGSFRYTRYADDIVISSMSFIDEQVLKQTEQLMIKYGFKMNHEKTYYMGKNGKRQVTGIVLDNNRNALTIGNKKYKKFQRMLYDYLVKGHGDLGYIKGYLAYIQEVSRQQYDQLAEIYKRYDIENVLFHNANGRMKYDYLVVGSGLYGAIFAHEAKVHGKTVLVVDKRPNIAGNIYTENIEGINVHKYGAHIFHTNDKKVWKYITQFAEFNRFTNSPVANYKGELYSLPFNMYTFNKMWGVVTPEEAVAKIEEQRSEITGEPKNLEEQAISLVGRDIYEKLIKGYTEKQWGRDCKELPAFIIKRLPVRLTFDNNYFNALYQGIPVGGYTKMIERLLEDIEVRLDTDYLEQKAELDALADKVVYTGPIDAYFDYKLGTLEYRSVRFENELLDKPNFQGNAAVNYTDRETPWTRIIEHKWFEFGKDENGNDLPKTIISREYSSEWKPGDEPYYPVNDEKNGALYAAYRKLADAEEKVIFGGRLGEYKYYDMDQVIAAVLEKCENVFGLMFESNTYVFRDLKKSLREIIAEEKGMVTLDSQFKSIDIRDISDNYRFIGGKEQCTEFVKKSLASMPQERCVNKTIRRTYRREDIPDTVFTKSHRDVEYMAATRKPRVPLQEQIRLINECRKSGMTDADWCRENDITPSTFYNWLSRCRKIAADQIPQPSYGHSETPRQKQDVVPVSIVHDQPAEPQDISQPYAIRSGNTPTVEITTSVFSIRIYNGADPAPVSRAFQLLKEFPCMVERKEYLDQLWAWKDEQQIKVVTGIRRCGKSVLLEQYQQRLLANGVMPEQIISINFENLDYEPLKDYMKLYNYLKERLCADKMTYIFLDEVQEVPSFEKVVDSLYIRDHVDVYITGSNAYMLSSELATLLSGRYTEIKMLPLSFREYMVVTGMAKEEAFAEFMKTGGIPYVAVMNRTDEKIDQYLEGIYNTVIVKDIEQRQARREKEGGKRKITDIALLKTIARYLASVIGSPVSMKSITDYLTSAGRKVSQNTVSNYVEALTESFIFYPVERLDIVGKQLLKVNNKFYMVDMGIRNHILPRKRYDLGFTIENIVYLELSRRGGKVNIGKCGSTEVDFVTQKEGVLTYYQVTADMTAEETFEREMRPLRSIQDNYEKIVLTLDRFSLGNYDGIKVVNVIDWLLGMTPAEKEKIITENRPFIRQHVKQKFPKFMKNYDELCSAAEAAVWLELEKYLPEKGTITTFMSSRIRHGASTYIAKNIFNVSNYYYRKMAIILNYTNSHEDIDLHCFNDVNSFIDTDTLIKKISEGTDLPERTVRNTLAVCRINNPIFRDSTQVFVDQTSYSNHEDSYVDNEDISIALSELDNIDQQIIIYKFELNHKPALSDEDIAKRLSLSQEDVVSRLACCLKILENSLVLKKYIRRCNLPALQMGNFVNPGNDAFQATLNAKIYVDKSGLLNYTNSVLASTDAYICNSRPRRFGKSITANMLTAYYSRGCDSEEMFSQLEISQSPDFKKHLNKYDVIHLDVQWCMEPAGGPEHIVSYISEQTIMELMMYYPDVVTKNMRSLPEVLARINAATGRRFVIIIDEWDVVIRDEAANLKVQNEYISFLRGLFKGTEPTKYIQLAYLTGILPIRKEKTQSALNNFDEFTMLSPSVLAKYIGFTEDEVRKLSEVYHQDFEKVKRWYDGYFLNDYQVYNPRAVVSVMLKGEFKSYWSETASYEAIVPLINRNYDGLKTAIIEMLSGSAVKVNTATFTNDIVNIRSKNEVLTYMIHLGYLGYDQSRKNAFVPNEEIRQELMLAVESRAWNEMQLFEQESESLLDATLDMNGEAVAEQIEKIHNEYVSVIQYNNENSLSSVLTVAYLSAMQYYFKPVRELPTGRGFADFVYIPKPEYREDYPAMVVELKWNKNAKTALDQIKNKKYPQSVLNYTGDILMVGINYDKENKEHQCLIEKYKKMIHYVVPHADSGYGFDVRKQYFVFRDLKKSLREIIAEEKGMVTLDSQFKSIDIRDISDNYRFIGGKEQCAEFIKKSLASMPQERCVNKTIQRTYRREDIPDAVFTKSHRDVEYMCKVMEDMRNEAAKEAARKNSIETAKSLLLLGKLTYAEIAQATKLTVDEVEELDKKKSAMARKNFFELLEREIDFQKEYEKIEDKIINDEFMLSLEAVIEKDFSDWPFRGNFISFWELRCHLGFTYTESDVYGEDYEPDRKHIKMDDFLLYSEMMLNMMQLLETKHELTYASKIRLVKDTILYDLEKINHEMVKQKDGRLIIVQKDAAVSAVVDLVEPDLAQIILEYHHYLLKGDLGAKKDILRKLADALEPKRKELDNLNKTLCSDFFFLVNKMNIRHNNCDPSDKSKYVEKFDKMTKQQKEAWYDGIFQQGLMLFLTIEQAKRTKEIAGFKAALNEKMLNIFYGDMKEAVYNTASYFKYDYEDDWITDPFVKEMIQDVDQSIVLDSGVIDSPVLGKIPPTGLSGGVKTLILVKFDKDKIFNASTCGDNCAKWLLKIAEKEDRIINLHHLMRFGTEPFTIRVLNTNQIVHSMEELVSIAGEFVMKGKHKIIVSTKRLKYEFELQRNLTIIQGDSATGKTTLVDMIRDFVNNPSGTPVELNCDKKCYVLEGALWKQQLTGITDGIVFIDEGNEFIKSSEFAREIQQTDNYYVIVTRESLPALPYSVEEIYGIRTSGKYGSLKQSYHEFYRLYGADTYENEVKPELVITEDSNSGYQFFSSVCNENQLNCESMDGKSNVFHFLNMHRDEKILVIADGAAFGSEIDKVLQLMYGRKNIALYLPESFEWLILSSGILKNSALDEILRNPSEYIESKEYFSWERFFTAILIEETKDSYMAYAKRKINPVYLEKTMQQAILKQMPGIIMCMADLKRLPVGMDDFKEIRKSEFYYIDKTKLIEQVLENWSKVNLFTRPRRFGKTLNMSMLKCFFEIGTDTTFFDGLYISKNQALCEEYMGKYPVVLLSLKSVEGLTFEEARASLCELIAGEVRRFKFLEKSDRLDDDEKNAYHDLIFIQNLKEAILGTKLKFSLKKISELLYKHYGQKAIILIDEYDVPLDKAFQHGYYREMVTLIRGLFGEAFKTNDFLQFAVLTGCLRISKESIFTGLNNFKVYAANDLRYDEAFGFTNEEVKRLLADYHLEEHFAEVKEWYDGYHFGNADIYCPWDVINYVDDLVFDPQARPKSYWINSSGNELVKRFIDKADTTTRDEIEELIAGHAVKKRIRMDLTYDEVDNTIDNVWSVLFTTGYLTREGREMDGIYRLIIPNKEVREVFVLQIREWFNRVVANDRASTEKINRGFLEGKTEDIQQELTHFLGESISVLDTKARNEEKEIFYHGILIGILKNNANWAVRSNRESGDGYADILIKPKNPDTGIVIELKYARSFKELDQACERALEQIKDRRYDEALREDGRNEVLAYGIAFWKKRCKVVVDKIMNSRRYFEIMPSEGEKKFTLPVNEHQVIFQRYLDMTYHVQELDQLYRMMLYNLEKIFRDYNLLFDDRVYTYNGQEVDVLQLNALIGNAISSARTLIESVEVFDKAYIDSDGTFKTYYISKAYDKWMAYRMVDFLRNYMQHGHVPISYDGNKIFLNLTEILDVHHMRINKALRQQYTDVYAQLMEQGAVETRLACVFPLYQYFLLVHKLYLDFWRYADWTLGHMDEEVRAIVAEHPEYRQTFDQHAFVPVYCDAAGLTHGFDLNADFLGALDGIKRLAEEKYEAYKASNGNLLILTMDYCLENRAPEMLFVDDSVLSNNLVEYCREHGQNVHHISFEKHYGSMDMHTVHEMFPYIQFEDGIQWNVPYSDVTIADFIRTFPNIRQTGICAQVNNVAGGGPLGHLIMHGWHMIMDSAAYIAEQMQIESAIDVVDWISRAEFVASKMRLLRQSFSRQDAHKPDVHFLMHYIRQQDHWNIIEMSQNMKAKPELLKMLLENLGYISGDSIHYQYDAECAEKMNQYQKKRKVEIENRHGSDVDCSAMNQAVMNANADALYYCLTFDVNQLPQAYMERLEDDRAYVNWDTSSKSFKIMEPLPTDCSIQKVYDIAEKMNQISKAMVLQCEKGKCIDEQMFLMADLKRLPVGLDDFKKIRENKFYYIDKTMLIEQLLENWGEVNLFTRPRRFGKTLNMSMLKAFFEIGIDTTLFDDLYISKNQALCERYMGKYPVIFLTLKGVDGLTFEAAKYRLAELIGAEAERFAFLAESTHLTENERSKYQMMIHLESGKYSADEEMLVSSLQILSQLLYKHYGQNTIILIDEYDVPLDKAFQHGYYREMVTLIRGLFGNALKTNSFLQFAVMTGCLRISKESIFTGLNNFKVYAANDLRYDEAFGFTNEEVKQLLADYYLEEHFAEVKEWYDGYHFGNADIYCPWDVINYVDDLVFDPKARPKAYWINSSGNDLVKRFIDKADMTTRDEIEELIAGHAVKKRIRMDLTYDEVDNTIDNVWSVLFTTGYLTREGREMDGIYRLIIPNKEVREVFVLQIREWFNRVVANDRASTEKINRGFLEGNVEDIQRELTHFLGESISVLDTKARNEEKEIFYHGILIGILKSNVSWAVRSNRESGDGYADILIKPKNPDVGIVIELKYARSFKELDQACERALEQIRDRRYDEALREDGRSEILAYGIAFWKKRCKVLAERLMDNSAARNKWMDREALENYRHAMRICCMNALHVCSDEALSELCYDLDISRNGDARAYEHLLGGQCMVITSEPGGGKSYLMWLLLRDYLEDCRDDSDRLPVFLDGRDCGIVWDSIEKGIVRALSGHFPLVTEELVRERLRAGGFVMLVDAVDAQSETGSFLLSELYCLGHDTDSTVIIASRMQCDRRDFHSDFVYYTIDPVSDEQIIRWLERDAALRMIGGDENGQNRENRRMPGRLLEVLRTPLFIRMYAMTAVHSAVHSDDWTVLSNHTALLEAYIDMRMKSMSCSPENRDRIFAVLCEYAADSYVNGDSEERFLNWERSEICTQIEAAGFITRRSQTVHFRYSVFHQFFMACYLSGLSAEQLNIWMDAHKSDKRYDESICYLAGILANHCSQNWILDYLEQNNLRLYVKALAYGRNYAASEVNINFEYACHFFARVLRTYESIIQTHFDNIYRLFDGYSIDDTGKVCIRGNMNLRQRTLSVCMYNGSAEAKTLEAVVSGGRGIYRIEDKTGVSFDFEEHMIRNRREYCYDLDLLTLGPDTAREIAVDMIRDQTMRAMDRKNIFDGHVDVLLAEYTESKLRRLRSKRWTGNSESILTLYTGDYDRIIHRLEQLSVTNIEINVCASLTALIRSRVDDVTELLDIRPDLPQTDLMLKQGRHSDRSEAAYSDRQLLKKIQRIWTLSDDAIRRITTEIVPALSAVRQPARKIGWVCRGDGFSGIRYIEVKTDEGEDISPILEFLEDADRIGTFGDLASAADLHGTGQLQRLGKCESDVLREGTSILQRYFGDYVFHSIIYKEVKRDFERLFGRRMIETIRLFDEDSHQTLFEGCVLSCEQDGDLYKITLNQTMFFPEEGGQSCDRGTLNDIPVEKVLEKDRVIYHWVKEPLWEGDTVTGCVDWEKRFSDMQQHTGEHIVSGLIHEYFRLNNVGFHLGSEAVTMDFDGVITREQLRMIEHKANEAVAKNLPVKITWPSREELMEIPYRSKKEIDGPIRIVEIPGYDICACCAPHVHFTGEIGMIRLTGMEKYKGGVRIQMLCGFRALADALEKERNVYDISVQLSAKPYEVAAAVEKLKNENLALKQEMTGMKMDILQEKITALPENEQNVCFFDKHMDKSNMRYAFNLLVEKCSGLCGCFDGDDENGYRYVMGGRDVDVIAAGKAMNEALDGRGGGSKEMFQGSLKAAREQIEEYFANLMDEAVFLQILNSLLEKAKKKKNELDYGDINDAFKGFEFDEEKMEEVYEFLEAKNIDIINIPEAQDDDDEFLDHQEEEVELLDDVDALEGVSLEDPVRMYLKEIGSVKLLSPEEEVELSKRAEAGDQKAKDRIIEANLRLVVSIAKKYVGRGIPFLDLIQEGNMGLIKAVEKFDYAKGFKFSTYATWWIRQSITRGIADKGKTIRVPVHMVETINKTLRMSRNLLQELGREPTSEEIAERLGTTKQKVEEALEISRDPVSMDSPIGEEEDSSLGDFIEDENMLSPSDSADYQMLKKELVNALDTLTDRERKVIELRFGLIDGQARTLEEVGKEFKVTRERIRQIEAKALRKLRHPSRSRKLKDFLQEMIFDTRFSEKESIRYGVVDGTATIVKYEGDEMRVVIPASIDGFKVTKIESYAFSEKSMKYIQFPDTLEVIDHHGFSECRELLNLDFPDSLKSIGNYAFYNCWALEQVHLTAHIRSIGFGAFKNCEKLSEIVQDKIEGLDISIGSILDDLNQQIHVIVRHLYPDKPVEEARVIFTEHDYEVVANVASMCKQFESTEIGSGKYIRYCIGIQDVDYNKYDGMFYVLLRGDSFDTIITVAMERLMYPYALTLEGEHTYKDYIAEHALEAAKKFIQEDDKDKLTFLVDLGVLDSDETDQAIDLALSLDKTEFTAFLMDYKHRNFSMADESFDLMHEMKEKLIKAGTDILNASKTELYVSMRFLDIALNSLGYEMDLSMKTIGTDSQKIRFNPRYLIENYQNDSVLVNRAYLHMLLHCVFRHMFHNRDKDEDVWNLSCDIAVTAIIDQMNYRCIRLVVPDERQAMYDRLKSEMKVLTAEGIYKSLKKRPLTWLEMEAAKKQFVVDDHVFWDSEQEDQKDGDGRNDQNQNNEDNQDDENNDQNNQNNDRQKEQKEQERKEQEKQWQEISEKMRTNMETCSKDAAEMAGDLYDYIKIATRERYDYKRFLQKFTTLREEIRLDLDSYDYIYYTYGLNHYGNMPLIEALEYKEVRKIEELAIVIDTSESCSGEYVRRFLEETFAILTNKDNFFRKMNVHIIQCDAKAQQDDVITSEEDMKRYMENFKLIGFGGTDFRPAFEYVNELCRKKVFRHLKGLLYFTDGYGTYPARRPDYDVAFVFLEESYNDRHVPPWAIKLILGPEDIQMGGLDHEHMNIKQAKDEIRHTVQAYLTKDALGDYAIPVVRQRPILLIGPPGIGKTAIMSQVARECGVALVSYTITHHTRQSAIGLPFIEKKNFGGKEYSITEYTMSEIVASIYEKMEATGLKEGILFIDEINCVSETLAPTMLQFLQGKTFGNHQIPEGWVIVTAGNPPEYNQSVREFDIVTLDRVKRINVEENYPVWKTYAYENHIHSAILSYLDIKKENFYQIETTVDGKEIVTARGWEDLSRLMQVYEQLDIPVDESVILQYIQNRRIAKDFANYLDLYKKYQTDYDVDAVVQGNVKPSSIERIQKASFDEKLSVINLLISKLTAAFTEVFDKDQYVRDLYEILKELKFVFGRAPKDGSRTAAILSEKAEQVEEELKLNKERGLYDASKLLSMKLILKTLEQYRQQLVKDNRLDPDEAFAFIKASFAKDTEERKQLIQTAAAYLENAFAFMESAFGESQEMVIFITELNANKYCARFIRDNGSAKYDRYNKSLLFDEKRENLLRDIGEASEFAAFLDMTEKILENFSIAQICESGQCFRMEEIQDGRYQVIAGDRYLELEQQGNRVRFDCTEVEYRDFWRHYFDIETDYGAVMAQINPNDTYLTAAAQLAWGVRILNQDLWEMIVTFLISQQNNIVRIRRCVKNICETYGTAKTASNGVCYYAFPTAQALAGLEEGALMACNLGYRSKYVVRAAKAVSSGEVDLAWISSLNYQKARAELLKLFGVGEKVADCICLFALHHLDAFPVDTHIRQVMEQHYKRGFPNRRYKGILGIMQQYIFYYELHGSEKMADIKQSALELIGNTPILQLNRYSEKAGIKDVTLLAKLEYLNPAGSVKDRIALAMIEDAEKKGKLKPGATIIEPTSGNTGIGLAAVATAKGYKAILTLPDTMSVERRNLLKAYGAELVLTEGAKGMKGAIAKAEELEKEIDGAVILGQFDNPANPAIHKATTGPEIWKQTDGKVDIFIAGVGTGGTITGVGEYLKEQNPNVKIVAVEPATSPVLSTGKSGSHKIQGIGAGFVPKVLNTDVYDEILPIENEDAFAEGKTFAVSEGILVGISSGAALKAAQILAARPENKGKTIVALLPDSGDRYLSTPLFAEMDMDFFDVSFEESLDEQLVNAILDVGRDIRRLFEGKESQSRILMILRLHGAVTQKMLIQILHIQPGSASEILKKMEKAGLIIRVPNEMNRRASDIVLTRQGRSVSEKLIEQRRGRYREMMACLSEDEKVSLFSMLDRMKEDWQQRFRAVTESTIASGDSSLQKERNKISETSSDGKMNTLVIVLIAAVCLVAGYCLYGRWLANKWGIDPNAKTPAVRKNDGQDYVPADGLTVFAHQFSSIAGAGPVTGAIQAAVFGWVPVLLWILIGGIFFGAVTDFGALYASVKNDGKSMGLLIEKYIGKTGKKLFLLFCWLFTLIVIAAFADMVDGTFNAYTVTEAGVTQLSDAANVNGAAGSISLLFIAFSAVFGLIQKKANFKGWKEVVLGLVCMFAAFVIGINFPLIASKTTWSYIVFAYIFLAAVLPIWLLMQPRDYMTTFMFAGMIIAAVVGLFAAHPTMNLPMFTGFHNEKSGDMFPILFVTVACGAVSGFHSLVSSGTSSKTISNEKDMQKVGYGAMVLESLLAVLALCVAGAAASADGTAATGTPFAIFSSGVAGFLEMFGIPVYVAQCFMTMCVSALAFTTLDSVARIGRMSFQELFTVDDMEHAEGWRKLLCNKYFSTILTLFLGYVLTQIGYANIWPLFGSANQLLSALVLITLCVFLKVTGREFRTLIAPLLIMLAVTSTALVERVIALFHAYGAGTAVFLVEGLQLIIAFLLMVLGVIIVISCGKELFHKKAGSEVSHNVKEPVTRMSFSDETDSLVRNGFSPLQESMFTDDRENRGRGRVIDMKKCTWKKYTASVLVAAMLAAQPMAVYADEASTASQAAYSDTEAKDINGVYERVSDKVAGMLANGELTYSETSGYLYNASGSKVDPETGAEIPDTTETETETETKAPETETKASDTETKAPETETKASETSASETETESQTGTGESETESQTGATDTETGTTETETTETGSETESESQSETTTPGSSSDNASASTDSKATESQTTAETGSNTQQDVSYKASGVFKKIGDRVQYNVDVPIKGLPSFITQEMIVGALKSQDEYGYPASVTIAQIIQESGYGTYGPGGNKGQGLSGLAYGYCNLFGIKGSGTAGSVSMRTSEMTKDGKIYSTTSAFRVYNTYSEAIEDRCKVLQNGYGDLISGVNDANTFAMRIGQRWATDLNYGKSLIKLMELYDLYRLDDMTLKDFSAMIGRFADPCPGAVVTSNFGFREFDNKFHKGLDLGTGSENIPTYAAESGTVIFAGYSGSAGNLITIDHGNGLVTKYMHHSEIYVKVGDHVEKGQQIGLSGTTGRSTGNHLHFQVEENGVAVNPLLYLEGNGTSSELQRMDPMKDIVSGTKVVLEKKDIETSGEDAQNAAVEETEAAESIAETDSQKQQKETAVETAEIADSAKQVVDKAVKTEKKTIKMVSRKEAITVKLNQVTEDVLKVIDSYGFKQEGAYNLRLNGMAVCHGDSRHIAIVKKTDLPGIDIRISSEAQNEQVHIPVVMSEPGLDVVYNDFYVEDGADVTIVAGCGIHGEGCSETRHDGIHTFHVGKNANVKYVENHYAEGNGTGGKILNPVTKIYVGENSVFTLETTQIKGVDSTKRETFVELGPNAKLYVTEKLMTHDAQHAISNMEVKLNGEGSSARIISRSVAKGTSNQIFHPKAIGNNACHAHVQCDSIIMDKASISSIPEINANHIDAQIIHEAAIGRINDEQLIKLRTFGMTEEEAESVIIENFLNMLQIEHLSFDVRDDGRQAEILSDISFNVADGEMLVITGPNGGGKSTLAKLLMGINEATSGRITLNGEDITDLSINERAQAGIGFAFQQPPRFKGMTVRRLLNLAAGRTLSESECCGFLSSVGLCAQEYIDREADATLSGGEMKRIEIATVLAKQHALCIFDEPEAGIDLWSFSMLIKKFEQIHKEKKESLILISHQERIIRMADRIMVISDGKIDRIGPAEEILPTLLDTSSQEACCYGQQKGGDYCEAMARDNQDLTKGPLARKILFFSAPLIVSNLLQVLFNVADIAVVGRFAGASALGSVGSTTILVTMFTSFLIGVSGGINVLTALYLGSGDRKGVRETVHSAFLFSILTGLTLLLIGAIFSKGILELLNTKPELIDGAVLYIRIYFLGMPALAVYNFGNAVFSAAGDTKRPLKYLSMAGVVNIILNLFFVIVCKMDVAGVAVSSIISQYLSAAMISVALFRSGDIYGLHRSELRLNRNKTVNIIRIGIPAGLQNAIFQIANLFVQAGVNSFDATMVAGNAAAANADALVYDVMTAFYTACGSFMGQNFGAGNRKRVRNSYLISLAYSFGIGMIMGLGLVLFGHQFLSLFSTDADVIEAGMIRLSIMGVCYGFSAFMDCTIMASRALGKSMIPMVIVIIGSCVFRVVWIYTVFAYFHTILSLYSLYIFSWGITAIAEIIYFVYIYKKRVCMIQLNPRVNNPAVGTFYVLLSAIFFSLGGFMIKIVPWQSLSVSGVRSIFALITLLLYMKLIHHPFRLNPSVIFGGICSASMSITFVCATKMTSAANAIILQFTHPVFLILILWIFYHKRPDKRAILTCIIALIGIVCFFFDKITSGGMLGNLLAIISGLSYAIMFQMKKMKGGDFESSLVISYILAFIIGLPTAVHETIHTPSIWLVIVLLGAVQTGLATICLSRGLDAVSPVTAALTSGIEPILNPVLAAIICGETIGPMSIAGGVLVIGSVLAYSLSQIKRPVSAGMFITDDIRYVGVNDHNIDLFEGQYVVENGMAYNSYVIMDEQIAVMDTVDGNFTDEWLKNISDVIGDRKPSYLIVQHMEPDHSANIANFLDLYKDAKVVATAKAFVMMKQFFGTDYPERQIVVKEGDTLSLGTHTLTFVLAPMVHWPEVMVTYDSKDKVLFSADAFGKFGALDVEEDWTCEARRYYFGIVGKYGVQAQALLKKAAGLDIQTICALHGPILKENLGYYLDLYNTWSSYGVESEGVVIAYTSVYGNTKKAVELLADKLTALGCPKVTVTDLARDDMAEAVEDAFRYGKLVLATTTYNGDIFPFMKTFIEHLTERGYRNRTIGLIENGSWAPTAAKTMLKMFEGSKNLTFTDTTVTIKSAVNTENEAQIAALAEELCKMDKVDHDVDHVHVMFRAQPKSELSKFINAYKSASSRLLKKEYMYCALVAYIVFEGPEEERNMNTLVEMINSMEVREDDETFKNAVDYMFDGLERRSPQHFAVRQYKKYKLASGKTAKSILISCGARLAPFDIPQLREIMSYDELELDKLGDEKSALFFLISDTDTTYNFLVALAFSQMFNLLCERADNTYGGRLPYHVRVLWDEAANTGQVPGLEKIVAVIRSREISLTLFYQAMSQCKALYKDHSETIMGNMDSIVFLGGREASTLKDISENWLGKATISMQTEGRSRGQSESYSQNMQRLGRELMTTSEITTMPGDKCILQLRGLPPFLSPKYDLKKHPNYKYTAEFDKKKNAFRLESLFRHRPLRLKPEDEYTVYEVDGSDTDEEADLLNFDDLDSDEFVMEFFNQAIDILKILVMALGAGLAVWGVINLLEGYGSDNPAAKSQGIKQFMANMHISYKPLWHTLLERDMRKEDLRLAAGMTTNMIANMSKEGKHISMDTLARICETLNCEITDVIELVPDEPASTGGKEHERIETKNNGKRNMSELKPRITENGIDYILVGDYYIPGLKLPEEHRPIGKYGRMHREYLREVHPARLNTLILTGELLTYLADLNEQAQKRLDTIMEQMKATEGVTEELKCTRQMEWVQRCNNIHNRAEEIVLYEMIYSMIEIVFGESACGSLKIAQTYGKGKYRGSAISIFMRHEDGSVPSSDEMKKAQLQAQEQERIAWENAIPLGGKSSDVYCFDMVLSVGDISDNGIGEQRKNIFKKMLSVCFVEDLDYQVEEKIQKIKTTLTSVIERYVAGEEIRIWYSYNPDELCGMYWLMKQLQPLNCQTTIYLVKLPTWEYGKENTMTSKIAWGEVSPGEWGNYITLQEKANPVFLSACTMKWNQLQNENAPLRAMLNGKLQSVSEDIYDSFILREIAEQPEQFKMAIVIGNVLGKYQLGISDVWISNRIDKMLEDGVLEIIQDAPKGETNYRRILRKRMKMKVATSIQERLWELRKDKGLNLEELSKLTGISKSALGSYEKEDYKEINHGNLITLADFYGVSVDYLLCRTENREQINTPLTELHLNDEMVALLKSGRINNRLLCELATHKDFIKFLADIEIYVDGIATMQIQNLNSLVDTVRHEIIERYRPGEDDPHLKVLQAAHISDDEYFSHMVLDDLNLIIRDIREFHKKDSESAPQTTVADELKENLEAVENFKGSRDEKLVILYCKQLGINYKNLSEEEFRWFIRILKKSKKMGTPISQRKKRMPRMSKKRKHELSFYLNDRGRVTYNELCRKCQHGCRQSFRAVVVDCPRYLSKRAKKKEEHTEMNFEFMTIDTPLPPCMPFPIALTGFPVSSTAKVMYCRMLDAMLSKGQEDENGILFVCFPVTAIAAVLSRSPMTVKRSLNELETAGLIMRVRQGVGEPNRIYVLIPGKEDAALAMPDTSKLEKLNRELEKSEKKLRKAINDEKALQHQLKQLTRKERTHRLCTRGGMLESFLQEPERLTDDDVMLLLKLIFHRQDTQELLKKLLEREKAETPMDKLKKNMVFYLLLLIDFYIVPWFIKDTGSAMIVMLVIIPLICLITSVFYRIRNGFNFWYILIVAIMFAPSIFIFYNSSAWVYVVGYAVIALLGNLIALPLGKRMPPDFTILLVVPVHRILLVTFPSAGRKFYSFPIFVKVINLTALGKPFPMFVHCPHSQQNMGVGIVSRRMGGMDCKISNHAFGNKLLLTKLPDKDSILVGWYLSWDGKHPPPCKLGVPLLLHRFGGVPMDWNDQKYCEIWRHEWEVIQNRYLEANDRPERVDLRSYARQGLDIVPTVHEGAAVRQMEKRGIQTNIGNLNREIKAANSLMKSIRQLIKNLKGWIIELSEKRKELLAEKAAEEAVFLPNLLMKYMEVRKAERSDWTRAGQNRGTSKDLKAVSEALSYLQRKGLSTVEDLENFIETSGKSAADYRKQMKPKETRSNVIDAILAARTDCKECKPVYEKYQKIFFKKTKEKFKLEHPEVARFEKASAYLAKHPDDKDSTKKELLQEQAKLVGEIADLKVPLTEVQEDLKKLRDIRYWVRKATPGTEESKEPPKKQPLKEVLQDKADEKKAQKNAPAQTKHKQQDMELMNVFEAVKQSVTTRQAAEHYGIRVNRNGMACCPFHNDKTPSMKLDKRFHCFGCGADGDVIDFVAALYGLGKKEAAAQLASDFGLAYEDWKPPGRARKPKPRQKSPEEQFREAKAHCFRVLADYLHLLRVWKTDYAPHSPEEAFHPRFVEALQKQAHVEYLLDVLLFGETEEKAVLIMDYGKDVIQLEQRMAELAAADAARTKKHHERHAAAPERMQPPQSVEEVKATLETTEKGGVRQSIRNCLTVFQRDPVLAGAIAYNILTDRKDIIKPIGFHRESTALTDTDMKYLLLYLEETYGLTSEKKIETAIGIVANENKYHPIRDFLNSLAWDGTERIRFCLRHFLGADVDDYTYEALKLFMLGAITRAFKPGSKFEIMLCLVGGQGAGKSTFFRLLAVRDEWFSDDLRKLDDDNVYRKLQGHWIIEMSEMMATANAKSIEEIKSFLSRQKEVYKIPYETHPADRPRQCVFGGTSNALDFLPLDRSGNRRFIPVMVYPEQAEVHILEDEAASRAYISQMWAEAMEIYRSGMFKLSFSPAMQRYLKEHQRDFMPEDTKAGMIQAYLDKYTGETVCSKQLYKEALNHTFDEPKQWEIREINEIMNQCITGWNYFSNPRMFAEYGRQKGWEREIPATDTDNPPEKSMDGFVEVTEQMELPFMKIARQRTVGNEVRQRASKDLANNLNLALITIYTFLLFFCCFGCQRGKKPGNKGFSPATGSATGMAKNKTKIEVTTVFDGELDATDVFVSLISQKYGKTNTKEYLAKKKDLKYNEDEVQQSQIPSGLCGMAMMNEMEYRTIGSALAGGYRAAVYCRLSKDDDLQGESASIANQRDMLEKYCEKQGWEVVAVYQDDGFTGLNMERPDLQRMLRAIERRQINLVITKDLSRLGRNYLQTGHLIEDFFPRNGVRYIAMNDGIDTLRDNNDIAPFKNILNEMYSKDISKKVHSSYLLKAQKGQFTGCLAPFGYRKDPEDRNHLLIDEETAPIVRLIFGYALNGHGPNYIRRRLEEEKIPCPTWWNRERGLRNTRTKWEKKDPENGRYMWDFSVIKDLLMNPVYTGAIASQKKDYRFKIGTIGEKKPEDWIVVEGQHEPLIDRMSFDIVQNKLKSRQRPGQTNEISLFAGLIKCGECGKSLTVRYTNAKHPQQIYSCKTYNAFGKNHCTQHRIDYDTLYSHVLRKIRECARAALMDGKAVADRLTNTCEAEQREQREAMERSLTRDEERIEVLDKMVMRLYEDMIAGRISEQNFNTMLEKTQTEQAELKAKVSEGRKRLSDEVQLANDAKQWVEAIQEYANITELDAATLNRLIKEIVVHERIDEDKTRHISIEIHFNLKPIPEVEQVTAMDFIIDAIVEWLKGLLVDGIMGNLDGLFDNVNQSVGEIATQVGTTPADWNAGVFSMIRQISETAILPIAGVILTFVMTYELIQMLIERNNLHEVDTWMFFKWVFKTFVAVMILTNTFNIVLAVFDVSQHVIQQSAGIIQNGTEITPDVLDSLRTELEAMELGPLFGLWLQSFLIQLTMIALNIVIFVIVYGRMIEIYLLTSLAPIPFATVPNRETGHMGQNYFRSLFAVGFQGLLILVCVAIYAVLIQSIATDGDPIGAIWGCVGYTVLLCFTLFKTGSLAKSIFGCHMQEKTAGGTPAAPIKLDVSVRIIEPVKNLMGFASVKFNDCFVVENLKIVQGSKGLFLGMPSQPDGKGGYRDMAYPVTKEFREQLNTAVLQAYEAKLEQMAERGSVGRASISDQLKAGKAAAEQAKAERPPKEKPSRSAERMPRKRTGYDAACYYDGKLLGRCTKADSDAYTLLMNACGGEAARVLREYAYFSPELRAILEKAALMQADRSRTGGMFHGPKSSPWGEVQNCETLCPGVFLVSTASHGGTMVANEVAAVLSPAAKKCGFKDKGYICYEEDAQESVVLRELLDKKLWKIPDRIKDKGQFEEKLNQSIRQYHPEYWRARQSGREAAEAARSTAPAKEAARMAYVPVPKDLSKIKTKLAFNLTKRQLVCFSSAAAVGLPAYLFSRGSIGNSAAMFLMIGLMLPFFFLAMYERDGLPLEKVLKNIIRTRFLYPRVRPYKTENFYALLSARKEAQPIAKQQKGRKARRQKAMRNSRRAGKPAGRKPEKQGLTGLFTKGKNIPTTAQQTLPYREMYRDGVCRVADRYYTKTIEYEDINYQLAQSEDQAAIFDGWSACLNYFDSSLPFQLSFLNHRSRPGSRYSVNIPMQDDDYNSVRCEYVEMLENQIAKSNNGIVRTKLLTFGVNVDDLSTARARLERVEADICGNFKKLGVKCRSLSGLERLELLHGQLHPGSGSPFRFSWDMIPKTGLSTKDFIAPDSFDFRFSRLFRVGTTWGAASYLQILASELSDKLLAELLEMDAEMTITLHIQTVDQAAAVKSIKAKVSDIDKMKVEEQKKAARSGYDMDILPPDLVTYSNDAKTLLEDLQSRNERMFLLTFLVVNMAPTRRELDNDLFTVSGIVQKYNCTLKRLDFQQEDGFLSSLPLGHNGIEIKRGMTTSSTAIFVPFMTQELRMDGEAVYYGLNALSHNVIMANRKKLKNPNGLFLGVPGSGKSFAAKRELVNVFLATRDRIIVVDPMGEYSPLIKRLGGQVIEIAPDSPHHINPMDIDLSFDEENPMALKADFILSLMELIVGGKDGLQPVERTVIDRCVRQMYREHLQDAETSKMPTLQTLYDLLCSQPEGEAVRLATALEIYVSGSLNVFNHETNVDLNRRLVCLDLKKLGAGLRTIAMLIMQDLVNSQVSMNFLRGIATWCYFDEFHVLLRDRLTASYCVAIWKMLRKKGCVPSALTQNVKVRPDRALCKAVMKPTSEILERIEKCSSEHKDGVFTRLYRYLLREDIYYAAYQKLYANKGATTQGIDDDTADGFSDFYIKELIQSLKDGTYKANPVRREYIPKKNGKLRPLGIPSFRDKLLQEVVRMILEAIYEPVFDSHSHGFRPGKSCHTALRQISSDFTGVVWFIEGDIQGCFDNINHEKLIEILSRKIKDSRFLNIIRQFLKAGYIENWKYNATYSGSPQGGICSPILANIYLNELDKKFREIAELFDKPRSAYQTLEYHAASKELKRLSYWIDHTSDEAARQELIDQHRAQKKAMRNLPCKPADNKKFTFVRYADDWLAGVCGTKTECEELKAEIAEFLSTELKLTLSEEKTLITHSSEKVRFIGYDICVRRNQEVKGHRMKNGTWRKSRTLHMKVALSIPHTEKIEKFMFAKKVIRQKENGEFQPIHRAGLLNLADYEIVEQYNAEARGLCNYYNLACDYHTLDYFCYLMEYSCLKTIANKHKTSIRKIIRQYKDGKTWSVPYETKTGTKRVRPVKIADCKRGEASDIIYQRKKFSWKTTIRQRLNARVCELCGCKEADLYEVHVIRNLNELGNSDWETVMKKKRRKTLVVCSKCHERIHRHMKLTAFGLRAIVARRAVLSGILVLKPQASGRCGGRPFPFSRSGAIAPGILRRPRPLKIPFVRFLSDDVSLLSKPRANMARSVLCPVHFLFFVLRAGGHNGVQLGILREAVNKRDGGIPEEQQPFAGIGMGHIGKLVGADPKLFSMRQEDEAGGPQDTGKAQEPDGSAEKAGSKKDKYQKAQAKAEHAGEKLGKAREKLDKTEVKRAAKPPPGLAKKAVRGARTEAWFYVHNKIHEVEHENVGVEGAHKSELAAEAGTRKLARYAKRRWREHPARKVAKWERKDIKARANVDFQKMASEHPELASNPLSRVQQKWKLKRRYSKEAKAAAKQGAKAAKKTAAASGTATRRAAQFVTRHPVAVLVLLLLLLLCFLVSAVSSIFPTLGSGLANALSGTSYASEDTDLLGVDEDYTALENELAQTVANIESTHPGYDEYRYSVDEIGHNPYELASYLSAKYHVYFREQVQDELREIFEAQYELTLTEEVEIRYRTETSTDPETGETTTEEVPYKYYILNVTLTNKTLPAVILPRLNEQQREIYTVMQQLKGNKPYLWEGIYNGGEDTGPSYEIPGEALDDPAFAALMEEATKYIGWPYVWGGSSPSTSFDCSGFVCWVYTASGVHNLPRTTAQGIYNQCAIISPSEAKPGDIIFFTGTYDSPGPVSHVGIYVGDGMMLHCGSPIQYANINSSYWQTHFYAFGRLMNKIDKLDKELEKAREKAAEWQAKIRELEKQKQEEENSQIVQAVRSLKLTPAQLMAFLNDPKNSLTASGHTDPKPEAPGKEDTAHEENMKKTKYRRLAAMAASLLCCLIFTVPAYAQSSEPQPEATPAPVETEAEPETQNPFTPDGTGTVVDNATDEDGKEFYTITTADESVFYLVIDKQKTSENVYFLNTVTTDDLLPLAEQGKEPPKEVTPEPEPKPTEPVEEVPEPEPEKKDSPLLSLLLIGAVVLAGGGIGYYFKIYKPKHEAPDLEDDYCEYEDGELEEIAEEPDDEDTPPWEKDTEEMNFTSSPFERMMKEVPHPGWNNDDPCKGCRYYKECKGKKKQCRKKFRALIVESRPSGHRGPKSMDARELTRDEKKKIRSLVTGMCANYDRESGLCLPLDCACYMLHKCWTGAYCRYFREAVLPLNPELQASLTTEGISPELRACAVCGKAFLPEGRQAYCSDACKAEGNRRKSRERMRKMREKRPGGCYDLPPPKAMETVQGYVILKAATFETGHGFALGHNPGAPSPFVTWQFTEGETGHRDYYWGRYGTSQAWAQRDFDRRVDDYQQLYHAAVKHTELGPEGVYRYYSTQRPVDIGTYPKLPDNQPLSIVNYDDDRRRPVADGSLMAWGELTYAKPLTEKQMEDYELKPAPGNPDRVRPSITARLKEGTRGQEPPKEPGQKRSHKNHEERMHEKDNYLKTAELSTEQNCNMIDGVPNNTPIPPTPPELDAKPLDKVKEPKERRKGRELERMENRKRNVHLHVMVTPDELAAIHERMAEAGISNAGAYVRKMALNGYILHIDLAPVKELISLQRRCSNNLNQVAIHAHTYGVYPEEIDGLKRDYEKLWGEVSKVLRELSELVAKMKILLKILVAPFALALSLLAALLVFLFDICAVLLTIASVILAVLGVALFFTPTPIGGIVFLFLAFLLSPYGLQAAAGSLLWVLDGGKSALYRFLASMATTTLLQRHAGEGETIAEAIRDCLDYGKDPEKTESGKYISAYECDPATVADEFLLAKASYAAMTGREQKKENNVLCYQIRQSFYPGEITPKEANRIGYELAMRWTKGRHAFIVTTHTDKQHIHCHIYYNSTTLDCTRKFRNFWGSSFALRRLSDRLCLENGLSIVENPKPRSKSKYRNYGEWQKDRKGPLSYQDRLRLAIDTALAERPADLDEFLNLMKRAGYEVKTVRGGGISFRLTGQGQERFTRLRASTLGDGYDLQDVLSAIEGKEKRPGRSERKISLAVDIQAKLAAGKGPGYERWAKVFNIKQMAAALAYIQDNGLTDYEQLAQKATEAADRFHAISEQIKQTEQAMKTNAGLKAATVQYAKTRPVFEQYKATKYSRKFLAEHEADLELYRAAQAEMRSLLGGAKLPKMDVLKEEGRKLTAKKKQLYGEYQKARRDMQELVTIKANIDTLMGYTEPGRKQEKERMRMNQDERRFDFHGLGAALKRAREEKGWTQAYVAELVDRDSRTIMNIENKGQYPSFDLFVKLITMFDVSVDQFIHADGGARSSSCRKHIDVLLNSMNEKELVVIEATAEGIKKARETEVPEMDYMTLKEAAEKWGVTPRRVNYYCAGGRIPGAVKMAGVWLLPKTAEKPIDGRTRQGKELRHEMNKILIIDDDRELCALIKRSVQSEHIEADFCNTGKEGLQKLKEQEYQLVVLDVMMPGMDGFETLEEIRKENSLPILMFTSKNDSISKVRGLRAGADDYLTKPFDMDELIARIVSLIRRYTRFNQQAGAVQKLDFDGLQIDLENRSVTTENGTFELPPKEFDLLLYCAKHQGKILTKQQIYEEVWGEEYFYDDSNIMAIISRLRKKLEVNPSSPKYIQTVKGIGYRFNKEVMEIIVFLSIGIAVVAVLTSIFLVRRVKKQIAEMTDALIDVKNGNGNRRILSATNELTAPLAYEINEIVVSYESRLSIVRQAEETNRQLMTSLSHDVRTPLTTLIGYLDAAHKGLVTGKDRDDYIETARRKSHDLKEYIDVLFDWFKLNSNEFALEIQSVEAAELTRNILIDWIPIFEDKQVDYDIDIPEQPVRVRLDMDSYMRIVNNLIQNVIAHSHADKIKIVLSKKENNMELLLADNGVGIEKDDLKHIFERLYKCDKGRSEKGSGLGLSIVHQLVEKMGGSITVESFPGEGTEFMLLFPLEIMDTNYIIETKNLTKQYGSQKSVADLNIHVKRGRIYGLLGRNGAGKTTTMKMLLGLTKPTSGEVKIWGKSLQGNEKKLLPRIGSLIESPGFYPNLTGTENLRIFATLRGVPNNHAIKDALDLVGLPYKDKKLFSQYSLGMKQRLAIALAVMHDPELLILDEPINGLDPIGIAEVRSFIRELCDARGKTILISSHILSEISLLADDIGIIDHGALLEEESLAELEQKSSKQIRFTLSDTAQAARILERNFHENHFSIQDDHNLRLHNLDLPVGKIVTAFVENGLEVSEAHTCEESLEDYFKRVTGGEGIAMLKLIKCEFLKLKRKPLVFISLLLSVFMPLAYAFFLADVNTDVDAVNGVMSSLFQLSACLLLMPLLVILASNLLFEELDNDTLKNLVTVPVNRTKLVLSKMLVLLLFAVGFMAVGGLVNLAVLLFQGWEPVGFWTLFGVGIEEGLIMWVGALPCILLVVLLNKNYIVSVVITFFYTIANYILSMNDMFLTQPFGLNIGTLFPGPLAFRWTFQFYDQSQTSAELADLLERVSPYFLNGVQVFGVIIVEAIVFLALIAFVYRRQEIMWNLLKSELLKLRRCQILLVGLVALALCPLVQYGSQLIVEAEYRNPNYDFSALFENVIWGNTQIFLPISLVMIGGWFIDRESTHDTLKNIMTIPVSMPKMLGAKLLLVSMLAVLLGIYSVGITLITGLTVGLSGLTAEVFFHGGTQIVLAALTTYLVCMPLILIFGQIRGAYLGGSILAFFLGYSMLFFKGGILASIYPFSAALILVGFDMSEYAGTTTSSNPLLAVIGVGIMVLWAVLLLLMSSNKKEMKSRKQANAKGKGKRAVRRKGRMIAVKKIVLSLCLILLGASVLSGCTKDEFLDQYNNIVQSAGSIALTGNSSLQGTKEKGIDDYTGSYTANYEDFSDTEYLFGGTSIKREAGKDLSIDCALEVTEGTAKVFWISGADEAVTLLETTGTYSDTITLPEGGNYIGIECENFTGSIELNIEMAIINLRDYYPFYTSDCFMEVSEEVAEMFKEFDRKEAAYRLRTYRHKAYYSLDRDDGLEHEAVFVVLSPHELYERKVTMQELHAAIASLPDKQAKRIHAHFILGMTKQDIARAEGVHEKVVRVAIERGLRRLEKILKNSLMGNAFGMIPGLEPDEWSNDACRGYIIMAMEDCGFSKKDIRRVVGQLYEVFDLNSVEDAKEKYLSSPYMTQAVTYERETKSVAFQGKIIVLESLTPVLPPKEKEQRKKEIERCLFEVFSKYGDRFPMEFIREDCIYARQSVDRKDSISIESQIDFCKYELKGGSCRVFKDKGYSGKNTDRPEFQKLLGEIRKGKVRRVIVYKLDRISRSILDFATMMELFQEYDVEFVSSTEKFDTSTPMGRAMLNICIVFAQLERETIQKRVTDAYYSRCLKGFHMSGQAPYGYQLEPTVVEGIRTKKMVADPVAADHVRLMFEMYAEPETSFGDITRYFEEHDIKIYGKSMFRTFLSQLLRNPVYAQADLELYEFFKSQGAAIVNDASDFAGTNGCYLYQGRDVKEDKDRCLKDQILVIAPHEALISSDTWLKCRKKLMANTTFQQGRKPKNTWLAGKIKCGHCGYALKATHVPNSTGYFRCTKRTENKGCPGCGKIRKEEFEQFIFSAMQEKFKDFQILHGREEKVNPKLTAYQVELAQVEAEIEKLLDTLTGANATLLAYANKKIEELDTRRQTISKAIAELSVETISPQQIKKLSYYLDNWDSIDFDDKRKAADGLISTIKATSDRVQIEWKIMYGSWESKFSRLETNEFDKIAKLPAMFSNLIDIVFWNRDAENNQITIRWYPAGEQRHYLYEMTLNLDTMEKVSEDDPYDLIETGEAYAKTGYIYADSAEAYLDEIELNAKNLELISLFGNTTGIKYEIRYAINEIYARKGYDFTGTGYEDYFCSKEWYHPIAGKQVTEEELNVYEKANIDLLVKIEQIVKAADAENENMLMNTSIRINDSMSLDEKKRAIQSIVKLADAAILNNEDSCKFRVAFERRLDASRLFHKTPYDAFGVRDLLLLESVLEQQFSEISDSIKIKSVFAEDRSVFGDVINNRSRQISKGQWRGLILSATPNNTYRRERLSQYSDRKFMKKVLSEHHPILEKIYAVLDGNSSTYSQLIQVSCSYIGPYTDCDEYCVKFSKLGMNNLKDSFQTYQMTLAFIEFLSKKGIVCSTPKAKLASRIAFDEIVFEFTCKKALEANRRGKDWMSKYRKNEEAIIRRVKQLKGPCPDFYIIGHSTSAMERLGLKIAEVIDRQEMLPFKGLVRTFTIKMPYYEDWQGAGAFIQHLCDSYSIARDCYDTYIGTIVVELAEEWGRSGYNSSLRVFLEYIAEHSDICFILLVPAGQNQEKDDALFAEFVRYGVWMRVYSQTPSVEQCVKHFVTMAEKESWRVQAEAEQLLAEKLKERSESETENIIVVEQLFRQIYFEQCMQNGRSKVIRARDIGLMPGIQKREAARTIGFVSEQMTKTGKDWDKFRKEVWRKFRIENRSRCRVKEQAKEMFEDGLRYQDARMASEDEMKRDLYGFHINDSRRIPKGGPILFRESDMAYVDPSEVHSLIVGDTGSMKTLRFVLPLIYSCAKAGESMVIVDPKGELVRKTKAFLSEAGYAMHIIDLRRPQDSPDKWNPMGCVEKSFAQGKSGEQKAILELNDLMETLFNSRSKSDKDRYWNESAGQLALGLCCLMQKIGENLNMKNLLKWRYERMENGDLDTIYQELPKTGEIYQNLAGYMELTASNTRSCILSTFDQLVRLFKASPALTDMLSESTFELSQIGLRKTVVFLIVPDEKTTFHFLATLFVTQCYQALLETASDYQDILPRRVNFILEEFCNMPILPDLISMLTAARSRNIRFHLVIQSYSQMIEKYGLNASQTVLDNCGNLIYLHSREMSFLKYISELAGCNEYHRPLLSSSRLLHLKKNETVIFHDRCYPMVVRDIPLIFEYPVSSEQLRFFSETLREIPSDDRMVVIEFFSETPIDNMISTLTSHPDKVILVGQSKIIRKNGKAYEKFLVSVGNDTTQIDYCSVIPHDLGNIVTALEKIVMDYPDCHFDLTGGDELAMAAIGIVYERHKDKGIKLHQYNIRTGVVYDCDMDGRVFSSEIPSLTVEQNIILHGGSIVTDTQRAGCTYPWVLDEEFTADVFAMWEICRRNCALWNYQITMLAEMMTFNSVIDDDLQLCANMEDVHTCLRARGNTLNLDGIFGPLTEAGMILGFGRDDEMLQFRFKNEQVKLCLTKAGTLLELVTLLTAKNMKKSDGTPYFNDVRTGVMIDWDGVVHNNKDGLVDTENEIDVILMKGVVPVFISCKNGIIPGDELYKLNTVAEQFGSEYARKVLVATDMGKAAKSRKYFLERARDMGIQIIEDVHKNGFGKLENILKTIMQLKIRHTLSEELALPLSYHHIIQSIIYRGLADESGYSRHMHNSGYAADNVNNMGRRYKLFNFSLLRGNYQVINGQIIFRDYVEWEIRSPDIYMMRLLESAFRKNGIHYGNQHFSDVALRLMNETVEKDSIHIRMLSPICLYSTNKETKKTYFYSPEEEAFPEQVNDNFVRKYTACYGIPPNSGIEIETVNVRRRDKYVTKYKEFYLSGWLGEYRLTGERKYLDFLYQTGLGSRNAQGFGMFEESPQREMGKLEFNGCKLKVQLEAQSPIIHFQHDQAGATLRASEVKPKLDRFLLNKMEQETGKRVAVLKEDNGYAVMFTDKEHNALNYRMNFEVPGNAYWVEPGTFKPESYSIYYGNSGVHDEKEKKKAVFTNPVMNLMCFNQVLRNYIEKYLVEFFAVTNFGTMQDKGFGSFMPKECLQKSGELTLEETKRFAEMLKQAAGSVHCYSMSFVRVPEEINAKNAWCTKVFKQIKDFYGIMKSGQNFGGYSRSYLFQYMHGTDNKGNRDDLSIDNEKAWLKQKGIVPIIEKNGKTDRVDKNPRYVRALLGVGAGMSFIQKDGKRLKVKINHKKGDGDAIERMDSPVKFKIIGNKVFITAEEVPEEIYGRMFEFQNKERNWDGNKRGSLMTPSKEDFKDGKFDIQTFLACYVNYYNSRKLRKDKLPSIAGNVEVQEVKMSDRKYIGITIGPILQTLEEAGTPAALWFASSYFSDLTRRICQALTIHMEGIQIYSPYYSETTVDNDGVGKYHDRIIFSADPFDEAKLREIIAHVKEDSLENFIFEEKDKGSIAYRHAKQFLEQYLQVRFVVMDAEQIEQNSLLTLSPYLDAMELMKTFPPDETGNPFKKLFDENKNAGLKKSALFKRMDGSHNQFINSQGNIRSITEIASCTGRVSRELKRSHYFAVVQADGDNMGKILSKLKDDEVRIFSKACLEYSGEASKLVSRFGGMTIYAGGDDLLFLAPVSNGKGQTVFELCQEIAMLFEGKMKDNFVGFSSCPTVSFGISIQYEKFPLYEALNHARNLLFGMAKNHCYSGEEKAVKNSMAIEVQKHSGQTMSLVLSNVDMDILKKILALDEGMKDGEQAVTSILFVVETYQFLLSVLNKEAREGKISEEDYESAWMNLFDNAEQKPAEGYLRRICSLWYRDILTGNGRMEAADAYSKDKDMAVLVNLLRIKKFFAERGGEMQYLVKMTPLEPYCFGTDQSAPYIGAENGGKGTYFIRSKALPEQTTLLGTLMILESQGLLKENFDYTPEERQQMAACIGPESFRFISEKKQNFGYIKEISPLFIISPEGHICIKNPLNNKADEGYDPMKMTDRTFETSEGLVHLPMQDEYNAKEGYADGYYDLSSGRIYRDLFKKIITTGNRKNRRPDQTNKDDCFYKRELICLKENFAFGLYVHADKLPERAVVYMGQRKSAFLVSAEISNDLPLAEQVEEAFAKCSGKWQYALSDLIVDDSWQTKDFFIAEEKQLRNLETIYQEKKHVGRLRKSSRRFNFVQRGSVFYGPEGPVMSNENSQQIGYNYIVQLGGRMAAIIVNLECMTNMHVGNGDVNYNIIDNEVEKDPVTGYPTINASGVKGALREFFNGDSELRQYVSTLFGADKAGDTTPGQLKVLCADMIARAARASSGKQAYYLITTQTALDKYCNNCEIFLGKPVVYEKKSADESEAAEGFRLEEKVELNGKTLYILPEETFKKIELPVLARNKLDNGISKNLWYEQVVPHESLFAFAVLGTEENLAIFKKAVDGKVVQFGGNASIGYGLCKVSVKEAMNKAIINDEIVIAYDVLKKSEIVENGKIKKTWRGQISTFGAAVTMGSLIPAVAFFSDQGGSSVKRQYIMDAILEILKRDHIAPEKYHTLFEYVREQGEHCREDVLNAAIALKLAMNLYTLEKEMKYTSENMNYIFNVSYFYDIDWAAFGSSKEENDSILKQHNDAIRDFSFKTASPVEKWRALQMKGYTDFQLCTQYPGLMIGTGNEHSLKMDGAIKCGFSFDYTTGLPYIPGSSLKGALRACFPGDGKKEEISQEYAAYIRALLDKEDVDIEQLKENIFENQDIFLGAFPVIGFTGKKLLEMEFITPHTSGRFKNPNPISQIKVRPDVKFDFCFILSDDCSEDGTVIVSAEEKKKLFKQLILDMGMGAKTHVGFGHFSERRPIQLREIAVSQPNRTNNRYGQSNRGQNQYNRGRRMKSTEPVLLAKCNHIFAWPFEYQWPKDDVENYAEPFKKKGWIEKDMDIQGMRKNGKIQKDIFMLNQYLSSSAKDIFMQTGENICTILEYPFDENDEWKYQIKVENQYYLLPIQSVELHVYRHGVGILFIQMSNNDYPSLQDIKKINDYGRRISMPLIPDTLEKDMLCADEIGIVGPKEKYLTNFREIAEQCLNEEVVEEKGLLESAEFLYALLNCRVGRETSEEDFASDEIIPTADDRMHVFCLLRDAELSRKISTMDWKHPRNSNEEEFQKLLYSIVFVDPEWPTCQNAEMRADFLEKALYLRWQEWGTIYSVTSFSFFCMTGESDEIVANVLRPFMTEYLYLLSLVLAQRIGIAGYSGKAGRIVRGVDKKGMIDKAQAETLINLQEKYITFKNQILILEASCQEQGIDIYHLLQNQMMIQEEQAILDEQLESLYEATNVSQGNRDAWWQLWIAIGAIVIDVIVNIIAIVADHGWSGMLQWLYDILGTGVMQTKFLFIDAETDGLYGSFLTVGLVVTDDAGNMIEKAYYGIIKENMMISDVWTRENVFPVLGDYEACEDEAELLEKVWAFWMKYREEAYAAADVMYPVESRLFMKCVMNNESERKYLGPFPMLDLSSLLMAAGYDPLIDRAELLDEDEKQMMANKTHNALNDAEMTAAIWFKLKGYLKVKMSSKVRQLSKEEILPEDLNIAAVTINRTIEFYSAPEFYGKARAYFFTNFVIITFGLLICTVRSFLFEDIETTLGFIIMTLLPAFISYLIWRPVSKKAHFKEYRLITAGMEPCFCYLEYLLFNFMNNKKKKELSKFQKTLAIIGLILCAAGAIFGFSQSMRMSVFFPPMNTAVRYILSTLFVTYFFAGFYFRPDQKFSELPLPAKILWLPGFIIFLMVLIGLLATVLYDRAILPTSNEVPYAILSGVIVFVIGMVYLVKQKNQMENLCYFLETNFSDLCELFLYISIAGFIIYLPFRSHWGKIFSFSNSMVFYACLAIPVICMMSAYQSVKPVTMGERIVLILITAVCAIVGLINLLICWDRCSNILEVIFLPLMFVCSIGVLCLLILLAFLAIFSASHDDYYMTECVLNMDGIMSQLCFSYIVFCRHKMSFFVGKYRLVCMDYEKIFLDWKTRRTFENEMPESSADSKNDTTKCAGMSDTSERNGSKLSTLCELTIEAGELEKALLDKVYGQEHAVSTFVTGYFQAKLLSMTDPSRRKPAASFLFVGAPGVGKTFLAETVAEALQCPFARFDMSEYADKDAVIEFSGVDGVYKGSKEGNVTGFVRKHPRCVLIFDEIEKAHMNVLHLFLQILDAGRLRDSCTDQEVFFDQTMIILTTNAGSSIYDDARNTSLDSVPKRTVMQALRTECDAKTGSPIFPAALCSRFASGNVILFNRMEVRYLKQILEYRLKKCVSDLEQQFQIQVHLDDNISKALIFAEGGMADARTISGRGEKFLSEEIYELFQQVAFGIGQGQIDRLQKIYFSVDFKDAALEVRNLFQMTADMEKSVRRLTRYHQVVDYSSKRRLAEDVTSAEVVLTDFQLRYAVEGVDSGRILAETERPNVTFDEIIGAEDAKEELRFFIDYMKHPQQYIEKGFHPPKGVLLHGVPGTGKTMLAKAMATEADMTFMSAEGSQFLKKYVGEGPEAIHALFRTARKYAPTILFIDEIDAIGKNRQSAGDSNSRADILNALLTEMSGFKTTGESQVFVLAATNFDVEGKDRFSLDSALLRRFDRKILVDLPNREERLRFLKQRREKSPALAFSDEEADRIAAGSAGMTLSRIKLILGYAMRCAAQQRFEKVTDDILDEAFASFDDGQTEALCSEEELKRIARHEAGHAFICWQNQHTPAYLTVMGNKSFGGYMLQENERRAYNLTRKQVYERIREALAGRATEIVFYGKENGASSGAADDLKVATQLAEKMIGQWGMDDTFGMAVIREKDAVCSDVESRLRERVNAILRQMLGETVAQIKNNKESVDLLAEVLILENHMDGRKIRELLESKDKYTVRMHEIGIEWMTQKEVNGHFLELRGIPDEKLEWERIPEAIAGANYYNIQNIPGQLTVEPNSGKIYLKIQYVTGADIRETTITDALGRYLEEEMAKICQWVAFLNQTEKVIGSQWLPQAAGKIGYSVEDKFLMACEMEEKLMAVLDTYTIPYMADSECMGVCCEWHRESQSQRYHITIRSAEMMMTISTVLSTPISEEQIPDTLETCMALNQEAWGSFYLDDDTGCVGYHLTAVYGRHVDKDWIAAQIALAEAAIGDWKKKEDDWRAQARMHVNQVRLAEKTDSISWEEQPSEWTAADTGSNEIENMIHQIQDFGRIAAADGENSKALRQMLMTRQGYLKKGAAVFFDEPGLCELQMAVCKDGTRHKITESQRAQGAILQVIRAAERFILERTEGYSEKILHELLINAFVHRDFNSTQCNEVLIFADHIEIFNPGAFPEGYEVEDFTSREQRPVPRNPLIARILYYMGCTDGIGNGLQKVSDVSWQLDKGGVTVWVSGGRIKSIQPADVDFNKNEKMILTYLETHDWLTNAAAREIVHVGTTAARSLLNGLVDRGYLRAEGENRGRKYYLAAKRPRMMRYIVPFYFDGAYEEVCRKLSEASDEWEPGQVACRYVYRHIYQTVNYAKGEKEKQGGVWRQNRQSAKINLWLKLRENEARYATISDSGVYLFRTGIGLFWYEIDFKDTELPVDTLIEYEDQLQTFGLNKREHFIYRVAGKKSFIVSDHPNLKEEKQPILQIREEKAPITGKLIEVYHRVPALSGKNVYLCADFEKHTETPVLEKKENERIDFCLTRLEQNESEVKAYISFREIESFSIPQWMNEKLQVLDCGISFYMMEGIKSKRGKKGQSETNGPRRALLYNYFSFEQEAEAQSDEGQRKQMLLDRADFLTAGHNKNFLRSPDVSEYVYQPFKDAYWYVSNSGCGCYVYKNEENRHYLKTNLSDNVRRDYFMIYILLLYQLYSLIHFSEKIEYELSADAKDYLKAPEAYNLKLKEIQAEINTFLLKSVHTSVSQMQTQNDFYQFAKKNLRLREEIQSLTAGVDFLEELLETQEEQRRQEKENAELLQRQQEEDKLSVGVAVLSLLAILSAFADGIGFLNEIKEAGSLMNLCRENIAYPIILVIVVLIGFVALVVCKDSAVRYWRSKRKALDRNVGEMNKDRIMAYIDNQSEIKKCVETQFPFFIAHEYHRFYELLEKGQLFGAFFEMKDVLEVLLKFPILVGTAYIQSKREPEEGKRCLEALIAHPLSLGQWAAYGNDLRKILQKDEAAKPLYQVLRSILQLYNRTGVVNWRNTRIGHGAVAGDIMQYAEDFKKYSTAINKHCMETESFYTELNIMLGGKKLKGYSLPKWDEITVCSFEGQTLEASFSQLIFDLRPYIFVQEGDIYFFDSMNSWRLVIDALDYVKGRKIVVQSEFFLKKYRELTGEGKYLPENSVSDVVFSSDNQYLNELNLAENFTSMDNLDEWLAHCLNDYDRGVFMLKMERGMGKTAFVSSIDQLIHGDDSRDEWMDVVVRCYYCNRLEFRSTNDFVAVCNTALFSKNRDAQKNIEGSEKELRTLSLTGKNPAQQMSDYLGFYQEIYDKMQFKEKLLLVIDGLDEITADRILETGHTIFDYIPAPQQLAENVYILLTCRTGEEEPLSQFVSQRIEHLSLTESYTVDRKSTEHEENLQRYLKKILPSTAYDQAEAIINRTGRNYVGLKLFVSLMGMEISVRDLLEMDNEYRLSLFLQKLQVIYGEKVFKKTIQFLTLIVNAYTPLSLSQITFLMGYREMPMEMLTIMYELGCLLDLKRTEIGTKIRLANETFRQHLRENYADVMQAQLSDWIQMILVQGSKELDNGASADLYKNEGAIYLYGNIMKYVEEWAAEAQKAVVYTNAFAGAIYQFEGKVDGRNHGYQGVLLDIGMTSGAIQIYGRLETDKQKVDWLNYAYCYNNRAYHKGITLSDAEGGERDLARAYEIVSGMPERDAKVLSAMGTFSNNMAALMSKWHYPLAEASVWSHRSIEARRQLMYLDFAENAENYMQSLLNYAGLLCKYGAMDELASLYQEINTICDEINAQYPDAYGMLRPKGNRVNFGYVFQRASMRTKYAQSLAEKGKTMAGDSDCYEKAAGLYEESLTELRELLAFTGGEQMAVHEALYKACFYLGRIYVLLEQQEKADACWNESFMHIHKLKSRGKLYQNGVLEEIKGMFPEAVQMSSNKMDEQEERWGKRNKEKAEIQQLYEFNEKHFDQGSEAYGQLIAAVENYSSKAIWAVLNNSPYNTREDYEDVIMRGRESFLQENNNVFFNYKNKEDVRKTVMFSDYARGMYQKKAFDHIKKRKRNSEVDPVPEDIYIENGYNNQIPSAGEVLIDYYAKAVMNSDANPFHIIFLCYSKMLPVVLGETRCNSADGWAWEHMQGKTMFRLSDLFVRMFNSAVRMIRVTFGKPYCDKLEKPFKDDKTGQLYEKLGEVILTSLYEQSNTKNWVARLNKKIMVKVVSEIMNAADSDEDAKRAATEAIAYTIGRMLDQQVLEEIYTIAEKVGAHQVLTEREQAMYDDILEDAGYYQVFCLYTAMIDFPTFYEQSVSEEKQKVKEWQSEKIREIEKHKNMKKSGNKNILCAVWGILCAATAFLGGFSHSMLINYAFLAVMGLLILIVDRHGLSKICRITKDLKGITETFSEAEAKGTQGNEAYLSLMESMHFTYPETEGDWMRLQESWKSSDGMDCDVEDYIFESELLESCNYNVCTQVAGILTALGILGTFLGLVLGLRSFDFSNADQMTSSVEALVGGLNVAFYTSIYGVTLSILYNIIFRRITTGLTQELNHFYDAFNSALEPVSQKAMAERMDSRQAENNALMQEIKELLDERLGERLGYQMAETLTPVFDRIIQSLDSMMLDFHKEQANSLEKIVDAFVDRMGGALNSHVKALGESVDELSQAQKTMSVELQRLIKQIVKTSKDTSQINEHAGIILEQLSGYIPLLTQTSQDSAKVIENMTQWSEDVQKMTDTQQKVMKEMAVEQNELLKTMAEHEAHLDQTCEQINLNQQQLSDSLTEFTKAAQIIAEREEDPLQLDGIKDMLSGYMTTMQKLQQESAQNIENIQSAGTGKIQLSSKGLQQDEEKWSKVLNEKMDAWIREQKAFQERLLQLEEERSQPFWSRWGRKMRRRDHVKKEENVSYWQSYSDMMAALLLIFVLVIAVAIVALNDYKEKLAEQNEELLARQDLLEKQADEYLKLKEELEEKQAEIDKIIGVKQEIIEALNQEFSKEEIAINIDQQTGAIVFDASILYDRSKSELKGEGIQFLDRFLPIYIGVLFSSEFKDDIAEIIIEGHTDTDSGYMYNLGLSQDRALSVVEYCLSDSSLSKEQKEQLRSVITANGRSFSNPVYDADGKVNLTKSRRVEVKFRLKDEEMIQELQGILERGDTQMSAKRKMSEWVKNYKELLLFLLFSLFCAFEAAGKGALNEFGNIEFWLMLSAIVLLVAAEQLGANKRFLMAVFMLATVGNLIHACQEVYYYHADELREAGQAIKMDYKSVNTDYILGFLAILAVLVIYPRFHKILSNDFAVFGMVVLTFAIYGLLLVAGQSVGGVRAWFHGIQLTEFVKILFVFVIAGLLSKQQMSRRQSFIRAGLAVLYMCGNIVCLGIISEFGTLIVMGIVFLIFLFIFPNKLWWLGGVLLAGATAIIVLLSVGSGIYQEALAKAPAASFTKMFAGELKEVTDDEGNRVSGVEMTRQLAEKVLEDMNNAEKASFEEASGQLKGDKVPEEVLTVLVGNSDFRSAYLQTFCHDDFWGNTAETLYDETGHGLVHKVKGAVLSLYNKCVQRFVLPMLPKDLQEKFLGVRDMNKTDAVYQTNQASRAMQIGGLIGSGSHEFMYIAVMESDMIFASMVSFFGFAMGFFVILLNMILLREGTRIQRSLETTSFHHGVAMGLTLMLFVQAMFIIGGNLGVFPLTGITLPFIAVGTTSMLVCFAMVGLLMTVSFINVTEQNRQADNKFKTICFMICGMLKKTVRNTGRGLGKGAGKMYKIVKADLDKADFDDSIEEEDDTVEADDDTWEADDEIEADDDIEEDDDIEADDDIEADDEIEEDDDTVKVDDNSETADTSMSEAIMKKTAKDERARMRRGRNSGKNTIFDDWDDEGEDEDVLMFYKFRVEMTYDKKLNYIRHLNDLDKIWKIKIFNDGEETVRGLQIKLSFVPDFAESWIGHIDEIKAGERADINEPNLVINPEKLLSYNEKLEGNIIVELMPADGQSEAVYKEAFPLTVLPYDQWLSNDHPELLATFVTPNDRRVLEILAKAGKRLGVQEGIAFSGYGSKQEVLRQMQVIFEVIQEEQISYCYPPANWDRGQRVRMPGFTLANKLGCCIDMAVLYASCLEAASLNPLVMILHGHAVAGCWLKDASFEKTVIDDRASVESRSYNKLGELAMVECTLMDNYAGNTSFTSAMNCTDKHFARFEYVVDIKRARQGGIRPMPLKEIHDDMSEENGGKLPGQGTEAVDSDAFYEEDDLDILPEEDHTMTKMDYWERKILDMTLRNTLLSTSFKGKQLPVMGTMPQMAALTAGLQEGRCFRILEAPDELALKRKQVTEPDEQNRLSQQFQSLTDGELHSGRIRVFLNRETYASYVKYLYRQAHTFMEESGANVLYLAVGFLKWRHKDETADRYAPLVLIPVSLERGRADTDYTLTIRDDEWQMNITLFEMLKQKYGIDLTHLDTVPMDDEGKTVYKALFKTVREAIKLKKGWDVEERAMIGIFSFGQYMLWKDLHDHGDQFAAQPLVGSLMNGHLLWKPEHVFMSRAQLDREIRPDELVTPVSADGSQLTAIEAASRGESFVMHGPPGTGKSQTITNMIANALYQGKTVLFLAKKMPALEVVQSRLQDIGLGPFCLELHAKKASKSHVLNQFAKTLKLADEKNVPLYARTADQLMEKRKMIRTLIERLHIPAKCGKSLYELMRILEKYQDAPDSVHFDIPTAMLASEEDLADWERQLEILKHTVASLGTIPSQHPLQQIRTKEFKRHEKQQLRQEMQQWFSCMAHLREDVAGMKQKVGIADCDTVNFKVYISLADILSHAVIYPEYMAELLDKDHSFEDIEQAYEKTAAIQEVLRTVDSLYDREIFSEDLAYEKKKLQIAGNGDGRLARMQRSGVLRMLRKYAKDPEQVTAENLPEQLEQLMALQEQYHDVGKLSALETEVLKNGSKIDLTLWQKADRRMKLVMDRLDTLAIDEESYGILQNYIEEEALAPDETFRSDRLFYKKIANQYLGLKQCTENIMQMADYDHDGRKDNISEIMLSDAWEGMLKNWQANYQDLDAWCSYRKESRQAQAMGLSAVVAAIEQGLQAEEMIPAFYKGWAGTYVKRTIEKEPQLQYFSGLAYEQIIEKYRKLSEDFEKMSRQEIRARLLERLPDRMDGSDSKDLSILKKAIMGAGSKMAIRQLFSKMPEAVQLLAPCMLMSPASVAQFIAPDFPKFDLVIMDEASQLPTCEAVGAIARGKSVVIAGDEQQMPPTNFFKKKSAGEDIEMDDLESILDDALALNMPQCYLSWHYRSAHESLITFSNTHYYDSELRTFPSVDASVSAVQFINVGGIYDRAGTRTNEAEAKAVVDELERRIMAGKAQSIGVMTLNIQQRGLINDRLQERMDQNPAFHEAVSGMNPPLFIKNLENIQGDERDVIIFSLGYGPDEEGHMSMNFGPVNQEGGHRRLNVAVTRARQELLVYTSFEPSAMRTTEHSARGLRDLKAFLEYAKQGAAVLDCQPGSASKEKETINRQIAEKLREKGWKADINIGTGKFRIDVAVHHPEKTDEYCLGIMFDDDASALQDTVRDRNLLQKNVLQRMGWNILNLWLLDWYEDSETQIQRIEDTLKNMTGMEQWVFVLPGADDQSECTFFANPSIAGYHVDDGTDIQLTVTFRDEKGDHVYDVVLTKTARKNWYASETYDIAARAWKKDYKVQAEITQKDGTAETEELSSEEVTAAWPTFKEKTVKLEKDSDGQLQKEISLNQWIQEEMTSPLFEYKVEDQAGCEIILDTQKQCVSINSAESKGEFTLAIVDPAGNEEVTEMSIIAAAGTEKGLGIGIVALAVIVVAVIAVLLLKKKTGSVGATAKTTKILAAREEVDKYCKRLELLTRKTENTMHEIRMAAQAAEERIRQDGEASAYDVDDIRTMTEEAENLFKEPCCENIHTMRVIMGAVSQNLLKMQGNASIKVDSGSHNGMENPKNYLDPAKRQDILSKIEVDAVSVENLCAEMSTILNTLKEIAYREEVPFEKDISITVTDGHGEYETRRACKEAYGAMASGVFSLDTLKFLSKNEVWMTLPEIIGQKTDIRIFAIDDNRMRAIAEKPILIWQGKNQRILEFTYDEDVVFRLRDHAYAEIKLHFERMSCCCPYCMSELDINKIKYYVKVENEPSQPKLKAFLAVNREDRHFYNFWSRYNRKLSPETLEKRIVKSLEEMENERARLAADAEQYERRMAAKNHSGENDEEIRPGQGIDNTLSDVPSDHFVVCEIIKEMKNRKPTQFTIREDGQRIAITYPVCPSCYNRIPEEIFELPLIKIALAASKSGGKTCMALSWFRTLNDARGKGLNSHVSQMDFISMLQDHLGMEDDFGKMLQKFNRENICPGGTHKQFIPPIFLKMNWHGKQERQALVGIYDAAGEVITESQRDAELVYYMKYMDGVIYMIEPDRTGLKKGLTNQYLCIRNEDIDAYYERARMLSVEEQSSVQARNFKKETLAQIMNVRDGDMKTFRENSAMEVLTALRSYVEDMKLQQMHVALAISKCDELRSNREIAEYNKGNLFFMDEEKVDNNLRNMRNLAIRKLFEEKIFNMQIFDNVFKSCSLHMIAALGCPAEVPADSEKKGDWEESRESRLTGDFNPIRVEEPLLELIFRYAEEHGWNEMERIIHFEQFYYTNYGQGMRFEGNSTETARTASALELLAANWMKQELNEPVEMVLYNSHLGCYVSAMTVPCTQTGDARTSYWIHAVMPDEKESDGFMDCLSWPLQDYVTEVHLAQHLSPVTVRTETCDLSAICRKYHLTGERLTQFLYQVLQNVCDSSAPSCLCFVMGEEEEDYNAAAREIMAVVYHLLPKPYRKKADYLAKAGKDMENVRFYFRTSSHQSWQFDMDTAHPWIRSELPEEETVFLNRMTELFRQNPAEYEQMMEQLCRQETDDYDAIVWNYYTYCLREGEMLPFSQETLLRIQPFLEERLKQDEGCRQLLCQCMHQINTKDKTRTFVQTLMEKYISAAAGLPQSGSSGYKQSLERNWQLMDQLSAGKTKIVASYLKWMKDISILYYQDFVEYGSKEGRDWLMDMQFADEAPPCCQELLKMDVRQMNAQRGHQWVNAMAQCIQTDINLQNSSAAAKAIWNYLIRLVEFMVPDPDAGGDVGQMLETTIQMQQLLQFIWKHRSIFDVTERVEICGVAKAYGGSVFDVFSRDFWREVRTEDFETLYEKKGITKLFANCPYDAYHDYRRYVGRRHKEEKTGKSHSQTLPEKSGNISDKLSEKESSPSEIDTQNLPGMMNQWVPDALADYGLWGLAMGTGFLAGLVFVWFAGYSVVTLIVVILVILLTAAAGIVYFKCKKMDFFTDLMGLILLIVCILIVLIFLKDYIRLGGKKTTVNKKQKMIVYEVHQNNKRIQQGWITDDQLPFQFGRNAGSGNDVVVVPEGTPADEAASVSRAWFYIQKDALGNYMVYSAELSGDGKKRQSEKKKLVVENGNTWKAMYTVKLQSEVRLKADQFQVILDVENPGESMIRKLIKFLKKCWGKKAAYAYAGLMLTACILTYKLYFASESNIFKSEEEKASVASSVAEGKIAYGEKNIIQGDITDRNDTVIMTSDSVDGYAHYKDAEAYTQAIGFASKDASYLLGKTSKAWLYDALPGTNKGCTIQTTLDSDLQEYCYSKLKNVCTGNGAGDEGSIVVLEAKTGRVLTWAYTPSFDVTELLTAYAAANHNTTTWENIVENTLHSETYPMLHPRMPGSVFKILTSIGIIEKGESCLSETVYDGTGYLQLENSVLPNAGGQVYGEIGFKQAFMDSVNVYFAKKAIEDVGKDRMDELAERCSIGTPQYFDFGMMLSKYDFNNNDEELARTAIGQQNVQMSAMHVAMLTMGAACDGQIAKPHMIQQVYRTKEKKTAEGSTYSKGEIVQEEKIDTGYMHIMSPETSEVIRDAMEGKGEALKQESGLNLVVNGQSIGIGCKTGTGQIDGSFGGYSGYNNIWLTSYVPADDPQYIIVLNKYKVDGSGTSSYGATMFEDLIDVCNRIYNNNHLNPTDNADETETDESDASAKEEAAAHVMFKKGDVINAIPPKEYGEWSCLMFTEDAKPVHGNPLKYMGKARPVCQAYQDEPELGRNLFCHSCRHQCPQREYMVKYVGRFEPQEAQPQTAAKMVEKTTKHSGAEGETHNGDLETLMSQRKTKKQVYDGSTVTEKKKTSSTESKKAERDLQREQTLLQQQAAVNIVSPFLMQTITSGEAICGKVPVFFVVLELVEGQELGEYIAAIHNLSDRSDTSWRCLDLIRQLLLAIRAYAKPYNNRYYVHRDLKPSNMMVKIEWENGMPFQQLKIIDFDMLVAQNHIREDNVYLGGTPGYVHPEAYRLKNLPKDTKRQFSHQWDLYAAGLIIYEIMEGHPYFKDDSYLSDPEKAFVLDMGEKSETALEYPELVEIMRKLLTNTAEGYTDIDQVIEDYQQFLEAVDTQWYRDYFLRNWLECGHDFDKGLAFCKVYCHISSEGLKDVRQNFCVNANSAVPLVYGKNIMGADCLSGSQMVQKEIGAFYYIIRPDGHCVLQFMPLNENCRVRGASGNNLEEGTEIYDADVKIVIDRIEMREEKWGTEPIRGPQRPMGRPVRRGGRPGADTNPIFNPGGGIRPSGKSHRNVKIGLQNDTTIDFVFDYTSSAKNILPVIYIFCRDVMQACQSGTGRVRFGVTFLSDEAESKQWKNKDFTSVSTDVLDAMLTHEVSGGGVDSYECLGTAVRMSLEKLSAVPAGERVLMLFTDSSPTDEDLERVFCRNETPIRSAVLFVPTAYSGSEYMFRMVDADGKTDRGKTAVVFDIEDVIKERYLKTVTEKNGRRVMDDNQLLKNQLLMALAMEKEKSNIQNLSVCYCLMKRESSNQTGTVRMSPMTEMLNHVQAFYENKGASVYSQAFVYGNQNAFARPFEQYPFGFRAGLDENVEKYDLTEMLVLCCGLLEDYLPGSEENRWEEEIKDVYRLVIISDYPLNTDSEAVEQLVNHIKALKRRCDFKIVYVDIAGNQQPGSLEEVIDFYDYEEDTAVMGEKEFNTNEVEEEMSLSGQLSRRRRQRRMTEESNSSAVGADEKNADSTGDASEMEGVSDQDHGADRTEHVKAETQEDKKIRITMLGISGSGKTSFLSGVYQTMIMDSFHGLSLVPSIDSGNSYQQIGQIADIALINRKDFDFADGTLETTIFPLTLQNRGKEICRFDFTDYAGGDVLNILNARGDMSSGAKALKNQLLGSDAVLVFADATVLCQGKNVVEWQQMTGATKINPLFNLLNREMGDRPLTVLFVLTKTDDERIPKEMKRNNFAVLSERAVQTFGMIYQMVQNHVQDGWSFGVIPVSAIGEGNYRLNSTCDSEGKLIMRPVIKEGHAPQPYNIETALVYAVACILSQWKEEVNREKESLTQRLIEEGRNNTIIGNLFSQWKKRPRPEEKVTGILNEIEEKNREIMTLSEQMNDLVEQAGIRQRIQRYRDHLDESGGISGMKVDILLRTRDYDRDYRWIFKPEYVDRVTEDKMSFLIQMMQKSELKQYLENESLYNLYYLYDENGSALVRSGFSGSMDRQGRNIYAVEGIACPAEMNRLFWYALPYLVDWLLQQPMLREQWLRENGPEENADVEHHMEVEGLKEDMIFEGSAEENRMWQCMKDHSACMRRLYADIYQSAEMYSFIYGTRPQSFYEGQTLRCYTPEAISSLAPVQEQNKIVIPKPVLREEDHLYRAEIQIEKKNRRYAAYLLARDGTGEAIAETEDMTFGNDGIGVAQIERALIALEHKIAPLGYSRGSRRVRTMKIRYTPFSERMVIDQPVKGMDFANDMIQMYFMMSLRYRECYYKQRPQGNTVYFMNYPEASLLFYFAAGMRSYRVNGFRIEKEERRKAWIYMLPLIQSLRAYDFGRKEGTKQLEDDFLDHMLDMEEVLSGALVPFHFILSSLPKECFPVCPEVRLFNRCAVEHAEKNYLLVTKNDIRQAEMPTAVYNKLSEIFWVPPDNRHKGWMFEYYTGIMENEGRKRKNYRVIHRPTDLPDKDGRCTYGQLSKEVMALMDENGMTECPFSGYNEQTWADHVLKCVIKLPCSRGDSGALYLQSATAGVMFQPRVFDLMNNREFDRCMRRIQKGDKTGLKEIYEAYISYIYAVIRGVVKNKENAEDLTAEFFIKLWNMADQYKAGSGHKTWMTVIARNMAIDFMRKAGREQLTEEVSEVSAADTAAGIADSMENEVVGRMNFRETVEKLPETERQIMTMKLAGQMTFKEIAEVLGIPMGTVTWKYQNSLEKLRRVGVMTEKEVEKAYKKMTESDAPDLWAKIESNLPEKEVRTEKKVRTGFFAKLGKIFSGGSTWKTSAAVCAVCIIVLGTAQGAGGMFRAGASNGTASAASKSSYGMDAYSVDGAEAYSAEGDGKEAAPADYNGMNYAAAAAGTGADADSSGGAVVLSENEASAAVGTEAAEASADEAGTAENGKEMANSADTENGQSSRKLIRTFNLDAETTDFDNLVAQLQQETQNLGGYVESSYVNGNSYYTENSRYASLTLRIPKDKTNDFLGTVGEMANVTSKSENVEDVTLTYTDLKSHVEALQAEQEQLMKLMEQAKTVEDTMSIQSRLTDVRYELESYMSQLKVYDNQVDYDTVNISIQEVKNETPTGELSIGQKMLNGLENSLRAIAESAKNLCIWFVASIPYFVILFAVIFAVVSIIKKIRKKKMAFSYKNALTFAFGYMMIIEKQMSTVQSGRQRQEKISLSRRLSMKKEKLETDNVYVCYCILREMHPGKHQAERLREITEALWDAQTFYEKMGALMFGQAFVYGSREVVVRPFTVYEEGFRETPEEFATTYSISGTLLRCYDLLNDFMPGEEEAQEEAEGLNNEMYRLVLISDYAPEGNSQALEILTRSFNDLKKKCDFKVCYVNTEDAHRVGNLGKMIDVCGLEMVKAIKVMLIPNNVQKTKMFQYAGASRFAYNWALAREKESYENGGRFISDSELRKEFTKLRHSDEYAWLLNISNNVTMSELTQKDYIDIKGAREHNLKGIDVKIPRNKMVVLTGLSGSGKSSLAFDTIYAEGQRRYMESLSSYARQFLGQMEKPNVESISGLSPAISIDQKSTNRNPRSTVGTVTEIYDYYRLLYARIGTPHCPKCGKEIKKQTVDQMVDAVMALPERTKIQLLAPVVRGRKGEHVKIFDQARKSGYVRVMVDGHQYELSEEIKLEKNKKHNISIVVDRLMVREDIEKRLTDSLETTLKLAEGLAVVDLPDQEESMTFSQSFSCPDCGISFEEIEPRSFSFNNPFGACPVCHGLGYKMEFSPELMIPDTSLSISQGAIAVMGWQSAADASSFTHAILVALAEAYHFDLDTPFRDYPQEIQDVILHGTGGREVRVHYRGQRGEGVYDMAFEGLIKNVERRYRETGSELTKQEYENFMTITPCKECGGRRLKKESLAVTIGGKNISELTEMSITDLNAFMDRLELTKQQHLIGDQVIKEIRARLGFLIDVGLDYLMLSRATATLSGGEAQRIRLATQIGSGLVGVAYILDEPSIGLHQRDNDKLLKTLKNLRDLGNTLIVVEHDEDTMLEADWIVDIGPGAGEHGGYLVAEGTAQDIMKCEKSVTGAYLSGRIRIPVPSQRRQPTGFLHIIGAAENNLKHINVDIPLGVMTCVTGVSGSGKSSIVNEILYKRLARDLNHARTIHPGKHDDIMGMEQLDKVINIDQSPIGRTPRSNPATYTGVFDLIRGLFASSVDAKERGYKKGRFSFNVKGGRCEACAGDGIIKIEMHFLADIYVPCEVCHGKRYNRETLEVKYKGKNIYEVLDMTVEEAVKFFENVPSIRRKLETLNDVGLSYIKLGQPSTTLSGGEAQRIKLATELSKRSTGRTIYILDEPTTGLHFADVHKLTEILRRLAEGGNTVVVIEHNLDVIKTADYIIDVGPEGGARGGTIVACGTPEEIAENPNSYTGIYIRKFLERDKMDHFELHSEYAPTGDQPQAIEKLVQGFKEGNQFETLLGVTGSGKTFTMANVIQQLNKPTLILAHNKTLAAQLYGEMKEFFPNNAVEYFVSYYDYYQPEAYVPSSDTYIEKDSAINDEIDKLRHSATAALSERRDVIIVSSVSCIYGLGSPIDYQEMVISLRPGMLKDRDEVIRKLIDIQYVRNDMDFKRGTFRVRGDVVEIFPANATDTAVRVEFFGDEIDRITEFDALTGNVKARLEHVAIFPASHYVVAPEKMEKAICAIEEELKERVEWFKREDKLLEAQRIAERTKFDIEMMRETGFCSGIENYSRHLSGLKPGEPPHTLLDYFPDDFLMIVDESHITIPQVRGMYAGDQSRKTTLVDYGFRLPSAKDNRPLNFDEFESHISQMLFVSATPNVYEGEHELLRAEQVIRPTGLLDPEISVRPVEGQIDDLISEVNKEIEHGHKVLITTLTKRMAEDLTDYMKELGIRVRYLHSDIDTLERSEIVRNLRLNVFDVLVGINLLREGLDIPEITLVAILDADKEGFLRSETSLIQTIGRAARNTEGHVIMYADRITDSMNKAITETNRRRAIQQAYNEAHGITPKTIQKAVRDLISISEAADKSEESFIKDAESMSYKELNTTIRKLTKQMHSAAAELDFEKAAMLRDKIMELKKMLHEIEEDMLEKLFKLSENHTDVKTEILAGITTFMTMAYILAVNPSILSATGMDQGALFTATALISFIGTLLMAFLANYPFALAPGMGLNAYFAYTVVLGMGYSWEFALTAVFAEGIIFILLSLTNVREAIFNAIPKNLKSAVSVGIGLFIAFVGLQNAKIVIGGSTLVQLFSVEKYNELNGVNASFNDVGITVALALIGILVTGILVIKNVKGNILWGILITWILGIICQFAGIYVPNPELGFYNLLLDFSNGLSIPSLSPILFKLDFHGIVSADFVVILFAFLFVDLFDTIGTLVGVSSKAGMLDENGKLPRIKGALLADAIATTAGAALGTSTATTFVESASGVTEGGRTGLTALTTGILFGLSLFLSPIFLAIPSFATAPALIIVGLYMLSNITNIDFADMSEAIPCYICIIAMPFFYSISEGIALGIIAYVVLNLVTGKAKEKKLNLLLYILAIIFIIKECSSLFFMENRNDRKSYYKGLLTGVILCVLIIGVLALSGCFLKDYAPSSTGQTTGTGNAVEASDVSSSSGDVTDISGRYKEVEKKLNKLHSVLDQYYLDVSDDSDITQDDMVEGIYKGYVDALNEPYTVYYTKEEYDQLQESTSGKYSGIGVVVSQNKETGVITVVRPFEGSPGAEAGILKDDILYKVADKEVTGVDVTEVVTWIKGEEGSTVSIEVYRPSEDKYLTFEVERKTIEIPMVTSKMLDNNIGYVAVYEFEETTSEQFNQAIDELTAQGMKGLIIDLRDNPGGLVNSATAILDRILSKDQLLVYTVDKNGKKQEEYTEDDETINVPISVLINGNSASASEIVSGCLQDYGKAKLVGTTSFGKGIVQYVLPLGDGSAIKLTSAKYYTPNGRNIHGTGIDPDVEVELNSDSETDTQLEKAQEIVLQEIQAEMSSFLYGIKQGIKNVFRNRLFSLASIGTITACLFIFGIFYCMVMNFQHIFSEVETTVGVTVFFNEGVEENQILDIKSQIEQREEVDNVHYTSPEEAWEEYKEKAFPDTDQNILTNLDNDNPLASSASLEVYLKDAAKQQELVDYIQGIDGVRSVNASKSVADSFASFGRLLSYVSLAIIIILVGVAVFLISNTVMIGITVRHEEIAIMKYLGATDFFVRAPFLIEGMLIGLIGSLIPVCALKVLYEKVISFMTTEFTSLSRFMTFLPAGEIFKVLIPISLIIGLGIGFIGSYLTLIKHIRVMIALDQVTKTYPGDVKALKGISLQIKKGEFVFVVGQSGSGKTTLFKLLLKEMEPTSGTIYINNKNLGRLRRRRVPKLRRGIGVVFQDFRLLKDRNVYENIAFAQQVVGAPNRLIKKNVMAMLKLVGLPDKAKSYPNELSGGEQQRVALARALVNNPPLLLADEPTGNLDPKNSWEIMKLLEAINMRGTTVVVVTHNKEIVEKMQKRVITMSEGVIISDERKGGYIYEMISNQILQNTIEGLKAITRIDLCVMDIEGKVLASTFSNAEDYEKFVLEFVNSPADSQVLQGFQFFKVFDEHQLEFIILARGDSDDVYMIGKVASFQIQNLLVAYKERFDKDNFIKNLLLDNLLLVDIYNRSKKLHIDTDVRRIVLLIEVNNERDMNSLETVRSIYTGRPKDFITAVDEKNVIVVREVKDNETYDDLCKASKVIYEMLCGENLPKARIALGTIVQEIKDVSRSYKEARMALDVGKIFYNERNVVAYSNLGIGRLIYQLPIPLCKMFIKEIFDSKSPEDFDEETLMTINKFFENSLNVSETSRQLYIHRNTLVYRLDKLQKSTGLDLRVFEDAITFKIALMVVKYMNYMETFDYMQQFIVTGMSCAACSARVEKAVSKVEGVTSCSVSLLTNSMGVEGTAADQAIIQAVEAAGYGASVKGEAAEHSGASSMAAEEEMLKDHDTPVLKRRLLASLGFLIVLMYFSMGHMMWGWPLPAFFENNYIAMGLVQLLLTGIVMVINQKFFISGFTSLAHRAPNMDTLVALGSTAAFGYSTYALFAMTDAQVKGDMEMVMHYMHEFYFESAAMILTLITVGKMMEARSKGKTTDALKGLMKLASKTAVVERNGQEVTVPIEQVKKGDIFLVRPGENVPVDGVILEGTSALNEAALTGESIPVDKKSGDVVSAATLNQSGFIRCEATRVGEDTTLSQIIQMVSDAAATKAPIAKIADKVSGVFVPAVITIAVITMIVWLLAGESVGFALARGISVLVISCPCALGLATPVAIMVGNGMGAKNGILFKTAVSLEETGKVQIVALDKTGTITNGEPVVTDMVPAEGVTEESLLALAASLEKRSEHPLAKAILKYVGEQQLTVEDVSEFEALPGNGLTAVRNGVKLAGGNYAFIRTQTEVSEDLLKQSEVLAEQGKTPMFFAENGRLAGIIAVADTMKEDSRQAVSELRNMGIRVVVLTGDNERTARAIGAQAGVDDVIAGVLPDGKESVIRKLQQYGKVAMVGDGINDAPALTRADMGIAIGAGTDVAIDAADVVLMKSRLSDVAAAVRLSRATLRNIHENLFWAFFYNVIGIPLAAGVWIPIFGWTLNPMFGAAAMSLSSFCVVTNALRLNLFNMHDAKKDKKLKNPAIIKELVDNNKTNHNQENKEIGTMKKTMKIEGMMCGHCEATVKKALEGLDGVASAEVSHEAGTAVVELSADVADDVLKKTVEDKDYKVTAINMKAEQQNIKRLLNTAKGQIDGLNKMIDDDKYCIDISNQIMATIAILKKVNIEILDAHLKCCVLHADDRERETKINEISEVLKKALKMTTNKTVFITGASRGIGRAIAIRFAAAGYQLALCCRQNTQLLEDLQQLIISQYHTDCLIFTGDTGDYHQLEAMISETIARFHHIDVLVNNAGISYIGLLTDMSPDDWQRIVNTNLTSVFNSCRLAVPGMVHEHSGKIINISSVWGCCGASCEVAYSATKGGINAFTQALAKELAPSNIQVNAVACGAIDTEMNAFLSEADRIALTDEIPSGRFGRPEEVAELVLDLAQKHSYLTGQIIRLDGGWIMKHGLKRFTRCVLVAALSVSLAVPTMAATKSEVQSQIENLKNQQSELESQLASLKKNKSDTESYISELDSKIKTYLAQLEEVSAQLEQTESEISITQDNLAQAKEDEKTQYTALKARIKAMYESGDDDYLQMLLGSGDLKTMLNNQEYISKINEYDHNLLVSLQNIRDQIAAYEAQLEEQKELQEAQKEQYEVEKESLEKIVAQKEEELVAIGSDIDSVNSDISSTQEEIDAENSLLQQIVEQERKAAEEAARKKAAEEAAKKKAAEEAAAKKKADEEAAKYNSSSSSSSSSSSSSSSSSSSNSSSSNDSYYDDSSSSSSSSSSSTGMIWPVGSSSITSYFGYRSSPTAGASSYHRGLDIGASAGSSIWAAASGTVITASYNSAMGNYIVISHGNGVCTVYEHCSALYVSVGQSVSQGETIAAVGSTGISTGAHLHFGVTVGGDYVNPLYYVSPMMIEFQCDYAEGAHPKILERLVETNMDQTPGYGLDPYCDEARRLIRKACGREDIDVQFLVGGTQTNTTIICTALRPYQGVLTAASGHINVHESGAIEATGHKVLALPCDHAGKITAEQIKAAYEAHMNDGSSEHMVQPGMVYISNPTENGTIYYKQELEAISHVCHECGMPLFLDGARLGYGLMAADNDVTLEDIARLCDVFYIGGTKVGALFGEAVVITNPSISKDFRYMIKQRGGMLAKGRLLGIQFQTLFEDGLYWQISRHAIDMAMKLKKAFQACGYSFYVENSTNQQLPVLPDAVLEKLAGKYSYSFWEKTDESHSAVRFCTSWATKEENVDALIADLNQIRSQMMMKGICLNLGFDKLYEVSAALTEQLRGYEITGSEAVYQQVVEQYDRLIAAIKAIDMSRNIKGLYTELAFEDGAALVDESIVREQLRQKRLKRQRARKKARRRALRRRIILLFLVVVVVCSGGLMVYEQFLSHEVVLGNRIYQNPLKYYQIRDSISLSGGDYELSEGYEGLKTAKVIQTLGLGNAVGMNGALYTSEIADAVADFQAQHGLNATGTVDLSTWLAMGLSEDDWYTLGAYVSPLRIDNTSSRTACIEAMISRAYDYLGDNYIIGASGAPGLGIDCSGLIMQALYAAGIDMSPINPVRHASPGYEYESANIWASSKFKHVDYKERKRGDIIIYCNEKGTVIHSAIYLGDDKVIEAWPNQVTESAVLNYQHSLVKGVVRPFVMSEFFSKNVIINKSDTIVMQGNGIFLLGSLDMACETHRSTNIFEDCESAKHVAIWYQRGQNTFMAITDETIEYVAALAKLDLTDEEKERAKKDLGNIIGYVDTMNQLDTTGIEPMSHVFAYHNVFREDLVTNGPDRDNILANAPEEKDGGFKVPRTVEMEITALTALELGKKIKAGEVTVEEAVKAQLEKIKERDSVYNCYVTVMEEEALKRAAEVQKQIDAGELKDSPLAGVPVAIKDNICTKGVLTTCSSKILNNFKPPYDATVIEKLEAAGAVIIGKVNMDEFAMGSTTETSYFGPTKNPWNTERVPGGSSGGAAAAVAAEEAWYALGSDTGGSIRQPSSFCGVTGLKPTYGSVSRYGLIAYASSLDQIGPIARNVSDCAAVFEGIAGYDAKDSTSVKMDDYHFTEALVDDVKGLRIGIPKGYLGEGLDPEVKEAVLAAAKTLEAKGAIVEMFDMDMVDYAIPAYYVIASAEASSNLSRFDGVKYGYRTPDFEDLQDVYKKTRDEGFGMEVKRRMMIGAFVLSSGYYDAYYIKALQVKALIKKGFDDAFAKYDIILGPTAPTTALKMGENLSDPLKMYLGDIYTVSVNLAGLPGISLPCGIDSSGLPIGVQMIGQAFSEKTLIRAAYSLEQTRSYERPACVKGENMREYETVIGLEVHCELATKTKIFCGCTTEFGGEPNTHVCPVCAGMPGTLPVLNKQVVAYALSAGVALNCDITQYCKFDRKNYFYPDLPKAYQISQLYLPICRNGHVDIEVDGVKKSIGIHEIHMEEDAGKLIHDEWEDCTIVDYNRCGVPLIEIVSEPDMRSADEVIAYLEKLRMILQYLGVSDCKMQEGSLRADINLSVREAGSDKLGTRTEMKNMNSFKAIARAIEGEMNRQIELLEDGKSVTQETRRWDDNKCASYAMRSKEDAQDYRYFPDPDLPPVSISDAWLERVKAAQPEMRDAKLARYVEEYGLTEHDAAILTESRKMADIFEAAAAICKKPKEVSNWLIVDTMRLLKVHEMDAADLKFSPDHLAKLIELIDAGTINRPTARDVFEKVFAENVDPEAYVEANGLKIEADDGALKGVIEGIVAANPQSVADYHAGKKKAIGFLVGQTMKAMKGKADPGTVNKILAEILNQMGNFFSTDGPLFEGMAYIINIIYVSVLWILFSIPIITIGASSTALYYTVTKVIRHGRSYIFREFWQSFKSNLKQSTAVWLIYLVMMGILLVDIRVMGAFGTAVSQTLQFVFVVGICMVSAVMVYALAYIARFTQDVRHILTNSVLMAIRHLPKTLLLVVVLAAAVLGCYLFGLGIVFIPAVAALVDSLILESIFVQYMSKEDREKEALRNHPEQYEYYNRKEMEKKELLYEGKAKKVYTTENSDVLIVDYKDDATAFNGVKKGTIVGKGVVNNRMTNHIFKMLEEKGIPTHFIEELSDRETAVKKVEIVPLEVIVRNVAAGSFSKKLGIEEGFRLLSPTLEFSYKNDELGDPMINDYYAVAIGAATREEIDKITELVFKINEILVDYFKSIKVDLIDFKVEFGRYKGQIILADEISPDTCRFWDSETHEKLDKDRFRRDLGHVEEAYEEIYRRIGLAMEKQLQNKGRSECGTDIKDELHEECGVFGAYNLKGEDIANWVYYGLFSLQHRGQESCGIAVSENRDIRYYKDMGLVSEVFTPENLDKLHGDIAVGHVRYSTAGSSVRANAQPLVTKYIKGTLAIVHNGNLVNAVDLREELEKNGAIFQTTIDSEVIAYLVAKERVTSRSVEEAVAKAMQYIKGAYSLLVMSPRKITAARDPFGFKPLCLGKRDDTYVVASETCALDTVGAEFIRDLEPGEIITITEDGVKSNRQYCNMVKPARCIFEYIYFARPDSVIDDVSVFASRIMAGRILAQSHPVEADMVVGVPESGNAAAMGYSLESGIPYGQAFVKNTYVGRTFIKPKQSMREQSVKIKLNVLKENVKGKRIIMVDDSIVRGTTSANIVTMLRNAGATEVHVRISSPPFKFPCYFGTDIPSGDQLIANHHTIDEIRQLLGADSLGYLDCDRMNEMVKDLEYCDACFTGNYPVDPPTRDIRGDMEVMNHEIYQSPLSERYASKEMQYVFSPEMKFKTWRRLWIALAETEQGLGLDITDEQIAELKAAKDDINYDVAKKREKEVRHDVMSHVYAYGQQCPKAKGIIHLGATSCYVGDNTDVIIMREALYIVRKKLINVIAELKDFAMKYRNMPTLAFTHFQPAQPTTVGKRAALWLNELIMDLDDVNYIISQLKLLGSKGTTGTQASFLELFDGDHEKCKEADKRIAQKMGFEACFPVSGQTYSRKLDTRVLNVLSGIAQSAHKFSNDIRLLQHLKEIEEPFEKHQIGSSAMAYKRNPMRSERIASLSRYVMVDVLNPAITAATQWFERTLDDSANKRLSVPEAFLAIDGILDLYLNVVDGLVVYPKVIEQHLMNELPFMATENIMMDAVKAGGDRQELHEKIRQHSMAAGRVVKEEGKPNDLLERIAADPSFGMTMDQLKAIMKPENFVGRAPQQVEEFVEEVIQPILDANKELLGVKAEINVMAALCVKAWCCRFEYGGKDLITFAITDIGDFTRKLLIQNVFDQFYVLEGEVSTFAAFTIDGELNEDYYSSDETELLQDRKWSLWSEIKPVAFLLMKGKKLPVSFKFVLQLSDHNTDWLLGKYHLEHLKEQLSGLYLNIRYQDKKLICVTGLSYKTFVMDKTLEHVWDDTAAQFMKQNGITVEKVMDKTIFVLLDACQYEAASKYLGYLEHMIDYNKGAKYKVLGELPSLSKPMYATLFTGLPVCKHGVTCNEVGGVLPYDSVFSLCRKAGGRTAAISYSWMSELYSRAPYVSDRDRVQLDAEGSIQYGMYYWDDNYPDSHVFAEGECLRKTFDPDFMLYHTMAVDEWGHMKGADSAEYANAVAAVGHLIAARMPEWLEKGYQVVVTADHGMNNLGIHVGTEHAQREVALYIFSDKVENGRFEENYISQLNVAPLVCKLMGVPATEGMKQELEIVFSKMKQSRHIIEKRRNDIVELLHQSGQQQVQTLSEYFHTSPLTIRRDLIELEKQGIIERTYGGACLKKTPEPLHDFADKQAIHNREKELIAEYALSYIHDRDTIFMNSGTTIYQLLKLLNNRPINIVTNNILAYECCPHLGGELIYTGGTYSDLTKACHGDFATNVINQIYANLSILGVNGITAENGATTSNLQETIVNGKMVERCTGKVIIIADSSKIGKTHSFTSAQIQDIDILITGADADPEELRRIREKGVEIHQVSSALPMALMIYSLIIDAGTSSIRGIIFDTDHQIVHIASQRYFMDVSEDGTALQKAESYQVCLEKMMQDCAEWAEGRKGKIHRIALTAGRSSVLPVDEKGDPLGPIMMWYDKRPQDICDRLNADYGDEIYRVTGMYARPMFSAPKMRWLKENYPAVYEQSHKLAGIQDYLIFLLTGEWVTDLTFASRTNLLDLNSNCWSERMLEIFGVDEQKLCRLVEPGSEVGVLKESWQNRGFDRKTKIYTAGGDQQCSAIGQGLLASGKIGINNGTASYVAVCSRSRLEDKEKVIHVNKGAALGTWIMEASNMGTGSVYDWMRKILFDFEEDTVSIEAMNEALNNSTAGADGIIAWPYLAGKGMPDWDSHKAGGLLNLKLSSTKENIARAFLEALVFEIADCYRRIERMVGRPEVIQVSGGLSKMPLFNQLLADVLDRKLVTVSCKETTGIGAYISMLLGCGEIEEKDISDILIQEKTAVYTPEIEQVTLYTALQKKRRQIEERMPFEAISEMKKGMKKILSVAIVLAMTMSLAACGGGTKETQGQASSETAAASGESAGTEAGETSVGEIKRGGTLTLRRTGTTPINPTQVIAPAGDMMTYSLFFETLTWFNEEDYSAQPSLAESWEWSDDSLSLTMKLKEGVNFFDGTPVNAEAVKTTMEYYMDPDTAHAQASYLANVDNVEVVDDYTVKFNFLAPDSSFLTAMAQPIGIILAPAAIEKFKSTNDPEVFAREGGCGPFKLSEFLDGESLTAVKNENYYKMGADGQALPYLDSVVVQIIGDEAVMAANMESGDIDAVDFFYDQNYIDEFNANDDIVLYKIASQTQYILYMNMQKEPFDNVKVREALCYAFDRDECIDVLLNGDGFKTPTIVLPTQTFYRDGKIYDYNPEKSKELLKEAGYPDGVTIEFYYGTYGSNKDIAELLQSQAAAAGFNLTLCPTDGASVKQLWASYNEDTPAGIRMNELGHPKPSPYIQMDYTFGQNALQNSSKWFSDDLAALLKEISQTTDETAQNEKLTQLQEMVEQEIPIVSLYTAYKFSAYRTWVEGLKYNGEGTMIFTEAWLNKMVSAIVKKILWSIPLLLLVSMIMFGVIHMLPGNAALVMLGDAGGSAEQVQKLEESMGLTDPLYVQYFHWISNFVKGDMGTSYLTSQPVAKRIVERLPVTLELIVCSVVLAVIIGIPIGILCAVKRNKLVDYIMSTIAMIGVAMPQFWLGILFVLLFSVDLGWLPASGYVTFATNPMRHIQSMIMPSITLALSLAAPIIRQTRSAMLDTLSQDYIMTAKAKGQNSVGIFVKHALRNALVPVITAITSQINGMIGGVFVIETLFLMPGMGKSMVDAIFQRDYPIIMGIAMVVVSCIVLINLITDIIYIFIDPRISLDSKMDIFKKLKKRKTAFISLIILGILVFLALVGNTILGIDPFETNSKIRLLAPRMGHILGTDNLGRDVLARVIYGIRISLAISLVSVAFALIVGTAIGTISGYVGGKVDSVLVLIIEAVCAFPTVLLGLLLATVLGSGMTNIMLAIGISNVPYFARLARSMAISIRGREYIESAVTTGLNHFEIITRYVLPNMSSVIIVQTSLSAASALITESTLSFMGVGVQPPAASLGVLLRDGYDYISKASWLSIFPGIAILLTVIALNFLGDGLRDALDVKIRVDNMSEQLVEVKDLKVTYYQNGVETPVVRNVSFEIKKNETLGLVGESGSGKSVTSKAIMRLIAEPPGKIANGEILFEGKNLLKMKEKQMQKVRGKDIAMIFQEPMTSLNPLYTCGSQIAEAILLHNKCSKQEAWERAVEILKMVGVPSPEKRAQSYPHELSGGMRQRVMIAIALSCNPRLLIADEPTTALDPTIQAQILKLIHDMQKEKDMSVLLITHDMGIVAENCDRVAVMYAGQILEIADVKTIFGNPAHPYTIGLLKAIPKLDEKVDRLYNIRGMVPRFNELPNGCTFGPRCDFCDKKCEEEAPQLVNMGDGHLVRCHYAGYLPERGIMEKLLEVRHLKKYFPVKKGFIKRIVGSVKATDDVTFDIYKGETFGLVGESGCGKTTVGKLILQLHKADSGEILFEGTDLTKLSKSELQKYRKDIQIIFQDPYGSLNAKMKVGTILAEGIKKHKLLPPDQIQPRVLELLKLVGLHESDVNKYPHEFSGGQRQRIVVARALSFNPKLIVCDEPVSALDVSVQAQVLNLLEDLQKELGISYLFIAHGMAVVRHISHRVGVMYLGKMVEIAETDELFEHCGHPYTQALLSSVPVANPLHKKNQIMLEGEVPNPINPPTGCRFHPRCRFACDKCKQEEPQLRKIAQGHVVACHYPEKVYGNMGKSEDLMKGIDRVGIFERMKDYEDMAFETRAIDVGNDSGRSAMPIYASVTGDTYQRHGDPSRDAISTCIASLEGMNYCLVTGSGVSAMTLPMLALLKKGDRIICHKDLYIWTYFFVREDLPRLCDIQVDMVDFTDLNALEAALKKEPARMVVFETIANPLLHVADMKACCELAHQYGALALVDNTFASPYLCRPAELGADIVAESLTKYINGHGDALGGSISTNSHAIYYELQRMMGVVGCCASPFNSFLILRGVQTLGIRMERHCDNAEKLVEYLRTKPFVLDLTYPGMQEHPQHEIAACQLKRFGGVLCFRLDTDHETLYEKFLPELKLFKHWVSLGEGHSLISPKDEDKEKGIPADFIRVAVGLENCDDLICDLERAFKRIFGMSKIDEITRESWIMSTFPEWGTWLNEEIEQEVVAPGNVAMWWLGCTGIWIKTPQDCNISVDLWCGNGKRTHGDGKMKVGHQMANMCGARMMQPNLRAIPFVIDPFEIKKVDAVLATHYHQDHMSAEYASHVIKSNLTTFDAEGKEIPVPFIGPKKSVELWQKWGVPADRCITVKPGDVIKIKDLEIIALDSFDRTCIVTTDSQGPDREELTGICPTDMDDKAVNYLIKTPGGNIYHSGDSHYSIYFAKHGKDYDIDVAFGSYGENPIGMQDKMTSCDILRMAEALRCKVVIPIHYDVWTNFMADVNEIRVLYDMKKDRLDYQFHPFFWEVGGKYIYPQDKDKRAYHHRRGFEDCFEAPQNIPYRSCLMDKKYCLGLYEKAMPGNLTMAEKLTAAREAGYDYLEMSVDETDEKLARLNMSREERKELTLLMEKTGMPIRSMCLSGHRRYSLGSAEGAEQSLRIMEKAIELADDLGIRIIQLAGYDVYYESSTYDTKKRFLDNLRKAAAMAEKTGVLLGFETMETEFMNTVEKAMKYVCLVDSPYLQIYPDIGNLTNAAVTYKQDIYDDMALGKGHLIAMHLKETVPGKFREIPFGEGHVDFEKAVRKAWELNIRRYVTEFWYTGNLQWKEELLHTCQKFNELLEEISNSMKVEKKIISNLTKCYSIAPLHYHEQDYILVAAEKQDPCLLFDCEGNQVDKVWDGPGGTMSMVQVPGTDGQFLATHRFYSPNDSKEAEIVIVTPKAKGDWEVRTLVKLPFVHRFDILERNGVHYLIACALKSGHEYKEDWSMPGKVYAAVLPEDLSGFDENHQLKLEVLKDEMLKNHGYYRIPEQDKDTCVISADCGVYLFTPPAKPNEPWEIKQLIDTPASDAVLVDLDEDGEKELVVLSPFHGDVISIYKKTDSVYQKVYEYEKTAEFTHAIYGGMLCGHPAAVIGHRKGERNLIAFSWNKAEKKYQSEIIDRDCGPANVFHYMKDGADRLISANREIDEVALYTLSMKIQRKNSGMDMLRGSLSGNIIRFALPLAGSSMLQQLFNAADTAIVGRFDGRQALAAVGSNTMIISLFVNMFVGLSIGANVVIAKYVGQRQEEKIKKSVHTVMFLAVLSGLFLLVFGQMTAEKILTLMQTPEDVMAQAVLYLKIYCLGMPFMMVYNFGAAVLRCKGDTRCPLYALILSGILNVGLNLLFVVAFKMGVAGVGIATVIANGVSGSFVCCFLMQEKGSMHFSVKAMQLDKKYLKEVLQVGIPAGIQGMCFSVANVCIQSAVNCFGAEGSAGFSIALTFESLTYYISNAFGQAAVTFTSQNYSVGNIKRCRQIFNWCLLLGGVLCESISLLFVAGHRWLIPFFTSDAGAAAYALIRMQRVVAFNGMTAGYEVGSGLLRAMGHSLQPALLVVVGCCGFRILWILTAFRRIGTFEILMNAYPLSWLVTDILIFVTYKYYITISTHMSEVKQEQGNLSINSENLFPIIKKWLYSDHDIFFRELISNGCDAVTKVQKLEVMGEYQLQEGEKFRVDVIVNPEEKTLKFIDNGIGMTADEVKEYITQIAFSGATDFLEKYKDKTNEDQIIGHFGLGFYSAFMVADKVTIDTLSYQEGAEPVFWECDGDSEYSMSKGSRTTRGTEITLYLNEDSYEFSNEYRAREVITKYCSFMPVEIYLSKEGGEQEYQTIEKDELREDDVIAETIVEDEKTEEKENENGEKETVVVSPRKERYKINKRPSLMNDIHPLWTKHPNDCTDEEYKEFYRSVFHDYKEPLFWIHLNMDYPFNLKGILYFPKINMEYESIEGTIKLYNNQVFIADNIKEVIPEFLMLLKGVIDCPDLPLNVSRSALQNDGFVKKISDYITKKVADKLSGMCKTDRESYEKYWDDINPFIKFGCIKDDKFNEKMKDYIIYKDLDGKYISLDEYLEAAKDKHENQVFYVTDELQQSQYINMFKEQGLNAVILKNPIDQPFISRLEEAMKDKNVKFRRIDTDLADVFKEAASEDDKKVLEEDQTKLTDIFKKALGVEELDVKVEKLKNADTSAMITLSEDMRRMQDMMKMYGMSQGQMGTEGQTLVLNANNALVQYVLNNPEGEHVNMFCQQIYDLALLSHCPLSAEAMTKFVARSNEILKLLAKMKQIKIGAITIGQAPRTDITRDILPLLPDYMTLTEYGALDDMTYEEVMSQFAPSEDDEVLVSRMRDGRQAKFTERFIRPLVQKKIDQAEAEGVSAIILFCTGVFPEFRHQVLFIEPQPLFHAIAAKLAGNQKIGILVPEPDQVEQAYHTWGKSGIPVEVTSASPYLDFDKVVEAASFFKGKNLAFICTDCMGFTMEMKHQIQEVTGLPVLLPRTLVVRILCEMFSMLLRQVIELFDLLDTPAANGTTVTNLFKERGNVEVTVENVKGDEGDTDCVTILIKGSEGKSIGGSAPTLGIIGRLGGLGARPEVTGFVSDGDGALAALAAGLKLTEMNTKGDIMKGDVIIATHICPDAPTQEHFPVPFMGSPIDMTTNNEKEVLPDMDAILSIDTTKGNRVINLNGFALSPTIKEGYILEVSNDLMDVMTRVTGKLPAIFPVAQQDITPYGNDLHHLNSILQPATSTNAPVVGVAITTEQPVAGCATGACHFEDVESAARFAVEVAKGYGDGIISFYDQKEYDHLIELYGPMNVFQTFGKDKMQKTILFEAKAIEDELIAHRRHLHQNPELGFDLPETTAYVMQQLREYGYAPKTVGKAGISAVIGPDGGKTFLIRGDMDALPMKEETGLPFSSINGKMHACGHDFHTSALLGAAKLLKAHESELKGQVKLMFQPAEEIMDGANDMIAAGILENPHVDAAMAMHVLHDNLGKAGYTRGTGCGSSDVFTIKVKGVGGHGAAPHLNVDPINVACHIQLALQTINSREINPNELIVLTICSIHGGTAANIMPDEAVMQGTIRTMNMDVKAFARQRLIDICEGVCKTFRAECEIDFIGDGIPPMYNDDQLLTDTIRYIDDLLGESTAQPIERMTGSEDFSALSVKVPSVLYWFGTGSTEEGYNYGVHDCRVTFNEEAIHRMAAVYTECAMRWLEEHQMKKRILALALVASMCVSLAACGNSGSKETEGTAANSSSAAAETTASGETEAEGDPVKGGTLTISLSASPSKLDPIHYTGNYESEIIKNVCDTLIEYNKDLSEYVPSLATDWTVSDDGMTYVFNIRQGVKFQKGKYQDGREMTAEDVAYSLNRSAEHSDSNRLSMLDKAEATGDYEVTCTLKTANSSFLTALTDGGNAIVPKEEVEGWGDDFGSHLVGTGPFSLESFQLDQQAVLKKNADYWLAEPNLDEVIFKVITDSTQAANALQTGELDVAMDLKGESVQKVKDNADLTLLETPGLHVAYVYFNMEQGPTADIKVRKALIEAVNVEEMVASLYKYGEAQSASLPLPPGSWGYDASLESKVPGYDPEDAKALLAEAGYGDGLTLDLYISDTEARQNMAVLLQAYWAQVGVTLNIHASEWGTFSEVAMSNNADVYGMSWTWYPDPYFFLNKLFSTDEFGGIGNGQHYSNAQVDELLQKALEATDQADRADYYKQALALIVDDLPGIFYANENVIYGVNGRVHDFIQRADNTVRFVTAENNVWVTDMLKTILKRILQSIPTLLIVITITFVLTRMIPGNPARTILGPQASAQDIAEMEIKLGLNKSKLEQYADYMIGILHGDFGTSYVYNRPVTSLIAERIPNTLVITLTSLVIAIFIGVGIGVLSAIKQYSILDYIFMILALVGVSMPIFWLGLMLVNLFSVQLGWLPALGMGSMSKGIGDVISHMVLPCFCLATIPTATFARITRSSMLEVIHSDSIKALRARGIKESSIIWKHALKNALPPIVTVLGLQLASAFTGAILTESIFSWPGMGTMIVSAIDNRDYMLIQGTVLFIAVVFVVVNLLVDVVYMIINPRVSYDSKGGNMADTTKTTSADALGLDAQAEMLKTERRANNVWNKLKRNKTAMIGLVIVVVMVFIAVFAPVLAPYDPDEIHPLDAFLKPFSEGHIFGTDQFGRDLLSRVIYGARVSLIVAAGGTIVGGIIGVLLGLIAGFMGGIVDSIIMRIMDGFLSFPFVLLSIILMTVLGQGLINVIIAIGIGNIPSFARVVRGEVHIVKNEEYCNACRVIGVSNTRLLFTHILPNAISPIIVYATLNVASAIISEAALSFLGLGIAAPTASWGSILREGKSSLTTAPFVATISGAFILITVLGFNLFGDGIRDVLDPKMKQMENKQTVQKRIEEIMPDLRELSDYLWHHPEYSFHEFKACKAMSELLRKYGFQVETGVGGIETSVKAVYDSGKPGLNVGFVGEFDAFPGMGHACGHNLMCAIACGAGIGLKSVIDTLGGKITVLGTPAEEGGGGKITMLENGAFEGLDFAMLTHASSDTCVNDISYSRTDIRVHYYGKTAHAATWPEEGISALTPVLELFNIVNAMRLEIGDKGKILGIIRDGGDQAIFIPDHCSAEFTIRSFSMKYKWELFHRFIKICENVAAITGTRFEYEMIDLSYEDIRNNPVLEDTLAENFKVLGEELCPRLKEQGIGCTDMGNVTHALPGIQAYIRLRPGLRVHTPEFEEATGSPDGYRAIEAAAKGMAMTAVDILSDSSKMEAVRKAFSEMKAQYEMSENILTVKDLKTYFYTASGIAKAVDGVSFNIAKGETMGIVGESGSGKSVTSSSIIRLLPPRTGKIVGGSIEFEGKDVLALSKKELNDFRGKDIAVIFQDPMTSLDPVFKIGKQMTEMIMAHQNVTKDEAWKMAVEALSKVGIPEPEKRMNSYPYELSGGMCQRVIIAMAVCCKPKLIIADEPTTALDVTVQAQVLELLKELQRDMDTAILLITHNLGVVWEMCDKVMVMYAGNTVEFTDTKTLYSNPRHPYTWGLLDSMPKLSDESKGELKTIPGTPPDLRLTGKCCNFYNRCPYVTEACTQSVPPLVEVEPGHFVACHRQNLTNKLEKGEGLKDEMSNEKKVLMKIEHLTKEFEIKSKKLGGKPQILHALNDVSVDIYEGETLGVIGESGCGKSTFGRTLIQLHKATAGSVTFDGKDLFSLKGAELKKAKKDVQMVFQDPYSSLDPRKTAGKLIEEPLIVHKLISDKNEREKRVLELMREVGLDIQHVHRFPHEFSGGQRQRINVARALAMNPKVIVCDEPVSALDVSIQAQVLNLFNRLQQQYNLTYIFISHDLGVIKHVSDRIAIMYLGRIVELCEADAIYENPLHPYTKALLSAIPPVSPFAKKERIVLKGDIPSPIGDQIGCPLAGRCPNCMDRCRKEIPKLKDAGDGHQVACFLYEMNNVTRNDVWELAKSRRNDLVKLASDLIRIPSENPVGTQRDVIDFVEKYLSDAGISYEEVSCNPDHPNVLAKMGSDDGFSVILNGHVDVVPAGDRSQWDYDPFGGEITDKRILGRGASDMKAGVAGLLFAMKVLKDSGADLKGNIRLHIVSDEESGSEYGTTWLCEQGYAEGANAAIIAEPTSNWTIESGQKGNLHIIFKSIGKSAHGSLGNYKGDNAILKLNKVLANIEMLTKIEGHYPEDLLQSLANSQMVAEKELDMKGIGNVINHVSANVGLISGGTRPNMVPDYCEATIDCRLPYGVDHEEIENTVKEMIKTAGVEGVEYELLWKSEANVTRDDSDIVQAIKKNAEAIWGITVYPAWQWACSDAREYRLKGVPTIQYGPSNTEGIHAPNENVDIEDVVNAGQIYVLSLCDLLGVKMQTLPKEVEQLFHYLQNGTSAFHVIAHTKQVLTEAGFTELHIKDNWTLTKGGRYFCSPFDTTLYAFTIGESCDLSNGIHIAGAHTDFPAIKIKPNPEIFSHGYMQLNTEVYGGPILNTFFDRPLSLAGKVVTKGDRYDRPVSHLVDLKRPAVYLPNLAIHMNRAINENGAPIDNQKHLLPILGTLNEYLNKDTTFMDLLAKEIGVDAKDILDYDLCMYNLDQPELVGFTEEFISAPRLDDITSVCALIHGLVESKNADRVNLVCLFDNEEIGSLSKQGADSTLPSVIIGKIWQAFGKNQIDCMSDISDGLMLSVDVAHAYHPNYPGTQDITNYPIMNGGFILKTASNQSYTWDCESMASLIALCQQENIPYQRFAKHSNTKGGGTIGSIISSHLPMRTADIGVGLLAMHSSREMMGKDDQIGLTHFAKAFFENMAYHIAVDSCTDMTAAMKKDEHITLVPLTLNVGEDKIIDDETFNQAEFLRKVAECPEAPSSACPSPDAYMQAYGYNNEDAYAITLSSELSGSYNSAKLGADLLKEEYPDKKIHVFNSRSASAGQTLILMKLQECLEAGKAFSEVVSEVEQYIEEQATLFVLESLETLRKNGRLSGLKATLVNVLNIKPVMGSTPEGTIQQLDMGRGMKKALMKMVEQIGKTVIHPTDKYLMISHCNCLKRAEWLKVEIEKKYAFKGIVIVDTAGVATMYANDGGIIVAYMSDPTILYPVSNTSREEFLAERKKQKYFITGMRFFILIFILAGWEIASRYHLIDAFIFSSPTRIFKVMLQMAADKSLFYHIGITIGETLVSFVLVLIIGTLIAMLLWWCRSAADILEPYFVVLNSLPKTALAPILIVWLGNNMKTIIVCGVTMAVFSTIINLYTAFIHIDSDKLLLIRTLGGTRRDILRYIVLPASISAIVSNLKVNIGLCLVGVIIGEFLAANAGLGYLIIYGSQVFRLDYVMLSIIILCILAMVLYQLLSFVEKRYQKKQMKPLLDLTDVNYTYQTAEGETPAVKNLSFRVFPDHFLGIIGPSGCGKSTILSLIAGLIQPNSGKIAVSAEIGYMLQKDHLLDWLSIKDNITLGPRIHHKLTPEKESWADKMLEEYGLAPFADARPSQLSGGMRQRAALIRTLALSPSLLLLDEPFSALDYQTRLTVSDDIYRILRTQHMSAVLVTHDISEAISFCDRIIVLTSRPASVKKTFDIHLTLDGDRTPFKARMAPEFKDYFNEIWGELNVMDKKHRYSAGMLAAALIVGIGIGFCGGFAVGGHTGSRQQNTTAGAEQSFETGDLSMEESQKMESGTDSSGETEIEPIGSYAVDDEPVLTIDDTTVYLSEINARAYMARDQYVADYGEEPWDTKMDNGMTVGEYAKATMLDEIERAVILCNKADEYDVPALTDDEEKQCASKAEDYMASIGEDIAAQFSVEQSAVLAIYEKDALSMKVYNQILENLSETLRQEDDYKDMEDNEFEQVLNDKFEEQYAQWKDTCKVETTETWEQLVIGAVGMGLKNLIKGQLLSSISYRSSDPQELAAVYDRDGRRIMYESVLTVMPGQAAILVNEGQMTDIFMPGRYELTTNNMPVTTTLNQWKYGFHDTFIVDIIFVNTNEIIDIPWGTSEQVTVKDEVFGLVNVGANGKYSLSITDPKLFAENLMGVKNRYTVADLKSFVTPQIAMYFKEIVTEKQMDFFDMQGYCYEAAQILKAKSDDFFGRYGIQMQKMAVQVALPETVKKSIDERASLGAFGGMDAYAYKRQVDAQADAMVAMAKNPNGGMNSMAGMGMQMSAGMAFGGMMAGQMNGGVQGQSGTHKESFVICPKCGSEMKKGLKFCSECGASLVVQKKKCIKCGAEINADMKFCPECGANQAQPVCPKCGYKAAAGQKFCPECGTSLLMSIYESLNPVQQEAVYHTEGPLLILAGAGSGKTRVLTHRIAYLIDECQVNPWNILAITFTNKAAGEMRERVDQIVDFGAEDIWVSTFHSTCVRILRRYIDRLGYDRSFTIYDGDDQKTVIKEVCKKLNIDTKIYKERTLLSAISSAKDEMIGPKEYLLRSEGDYARQRIAQVYEEYQKRLRSNNALDFDDLLFKTVELFKTDAEVLNYYQDRFKYIMVDEYQDTNTVQFQFVSLLAAKYRNLCVVGDDDQSIYKFRGANIHNILDFEKTFPDAKVIKLEQNYRSTKTILDAANGVIHHNQGRKDKTLWTDNEQGVPIALNQYQTEYEEAMGIVNDIAAKTERHEAEYKDFAVLYRTNAQSRVLEEKFVTRNIPYRVVGGVNFYQRKEIKDILAYLKIINNGQDDVAVRRVVNVPKRGIGATTVTKAAEYADQWGISLYEAFKQVDGIPGLGRAAAKINGFVNLIQVFRTKAEYMSLAELYDEVLEDTGYLKELQAEQTDEATTRIENLDELRNKIVAYEEETEQPSLNELLEQIALVADVDNMDDSDNKVILMTLHSAKGLEFPYVYLCGMEDGLFPSYMTIVNDDPMEIEEERRLCYVGITRAMKKLTLSYAMCRMMHGQTQYNKISRFVKEIPPQLIGGSLPRERFSRKVEDDLPWNTGSASNGISGFGGSRAGTYGSGSRMGTGVGNRGIRQSHKFDVSAFAKKGGDMKKTAPNYEVGDTVKHIKFGTGVVQAIKDGGKDYEVTVDFPKYGPKKMFAGFAKLKKVMNKFEEYLSMAKISDFIHRKELEDEKKKTVCLVFAIIAGIAAIAAIAFGIYKYLSREDDVDDFEDDFEDDFDDDFEDEEDDFVKEDEAAPAKDEEMKKGQMCEGIIEYIDFPNKGRVKVEDQYVTVKNGIPGQKIRFVINKKRKDRCEGRLLEVLEKSPLETIEPVCHEFPACGGCMYQTMSYDEQLKMKAGQVKKLLDTAISSAGQVDAEGKPDYVFEGITGSPKQWAYRNKMEFSFGDDHLDGPLTLGLHKKASTYDILTVDDCKIVHDDFTTVLKTVLDYFTEHPMPYYKKMKHTGYLRHLLVRRSETTGEMLVHLVTTSQEECDLTELTQRLLALQLEGRIVGIMHIINETLADVVQSDETRILYGQDYFYEHILGLKFKISTFSFFQTNTLGAELLYDIARSYIGDTKDMTVFDLYSGTGTIAQILAAVAKKVVGVEIVEEAVEAAKVNAGLNQLDNCEFIAGDVLKVLDTIEDKPDYIVLDPPRDGIHPKALDKIIDYQVPNMVYISCKPTSLARDLGVLIERGYKVKKTHCVDMFPGTVHCETVCLLSNRKPDTTVKLSVDMDDYYRIKDGKEPKMAKKNLRNMKVCGQSGYKYETVPAITLKGKWLEELGFHLGDYVQVKYENGQLIITPDVNKAQEQEAKTAFMDEEIKKLKVRYQNEKKEITAKYVAEQSAGCYGKKAMARIIMCGSFKGGVGKTASSWNLAYSLAEMGKRVLAVDFDSQANLTTCFGVEDPAAVPVTIGHLMMNRLEDEEMPDPSEFIQSRNGVDFISSSMMLSAVDSTLRMEMGSEKMLTGILEPLRGLYDYIIVDNLSIAWNIDNMIIAVNPQLLAMMGLQDFIRTVKKVRSRLNDRLQIAGILLTMCDARTNLCKVITEQLMDTFDGQIRIFKSIIPNTVKVGESIYYSEPLLEYAPENKACKAYRNLAEEVAGDESMKANAPKRKVFQDALDLLSEDPVQDTPVSVNGIVSIPVEEIHPFHDHPFRLYEGERLEDMVQSIREHGVLNPVIVRKAARDYEMLAGHNRTNAAKIAGLTEVPAIVKTDLSDEDAYVYVIETNLLQRSFAELLPSEKAAVLVARYEKISSQGKRNDIRQEIEALEETCGHDVHKSRKRTCGHDVHKSQKSRDGLGEEYGMTGRNIARYMRLDRLIPEFKDAVDKGTLAMVAAVDLSYLNVKMQKLIQQVAEADGKKLKPKQAVELRRMGKEITKEGIESVLAGKEQKKPQNVSVKLPMELYEKYFAQMDAGAVQEIMEKALEGYFGKEAAGVMFSREDLECLNPGYFEIIYIDDRDVTIMSRNTRHMWYIHNPEYPLMGSCIIFHKHKVSHPYHQHGRSNTLRQAVRSIKSHDKWQLGGRKMDKKLVFLDSVLLQQDMRIRLPKSVLVNIDGKAGETRLDVYFDAITKEIILRNSDNQNNKESKIKKQGMPYTHIDCFSGPGGFCTGLHAAGFETKVAIEYIKSCVDTYSANHPEVHVIHSDIREVTADQILPYIPKEGIDLVTSGMPCETFSTAGNSSRAAYDDRQFLFREGIRIAQIVNAKMILFENVPNIQNKRIAKNSKELVIDYLKKELEEAGYGNFKEFVLDASKYGVPQKRKRFFILASKDSQIDVSQTPVETTPDKEVTVKDAFIDIPEVIANTWTENPNYLKEESEYTRLMKNDSFWKRITKEKKLLNHLPMNHRKNILERFTILQQGEGLKGLFERLTAEELAEYQSRKVIPKTIYVKRNYRLKWDEASPTVTSHCLDEFVHPVQPRALTVRECARLQSFPDSYDFVGGKYLTAHDNREEQDKYEQIGDAVPPLLAYAWGIKIKELLDMAKTKHPILNEYNLLKESFNQNPLASAVTDIIINIHNECQNELKSKQKHSLNPGNGTIGKTYFYFSDDKKHSRPVNQALFEDGYQPATDFSGTPVKNQEGLTITKADWFLHNLKNNTIKNQSADDITSALYAISMEFCCSTDLIASNSQKICGTYFEKLIGHIYSRHLNVAPSSTQYACELDSTSIKIPTDFIFNLGPNMPKFDVPVKTSTRERCVEVWAQQRILDGAYGAGRFLGLLTCISEAKMNSESKDHSKWKVDDVCVPNQWINYQLFIAQIKRAYYLDVPNRYDQLNNSFPRIHVKNLVSSSLNGKICMSKINISVDFQKFCNSLRMSDNTVSNVRNRYHMITKRINQDFWNSDSIVSHSWYVGSYGRGTSIYTSDIDIVVEIPWTEYERYDNYLYNGQSSLLATLRNSLLKTYSSSKVSADGQVVDIMFSDGIKFEVVPAFRYSDGAGFCYPDTNNGGSWKSIDPGMEIGVFNYRNNETNKNLKKLCRMARAWKENKTVLMSGILIDSMAYNFMLSYQYAKEPFIYYDWISRDFFKYVYDNSDKRYWDKPGGIGTVERKYYIKDDAKFAYDKACEAIEDGEKGFSFCWHNEWREIYGSRFPNAMGQDFQTHKEKLYQQLKEQYGKVVYTYTAHLKNAGFLQRDCNRFKWVQIILSAISTGGFVATVIMDEAKVAWVGGIVSTALLVVNGYLKSKDFAAEEQKHIDVANSLWSIREDYISVLTDFDALSENEIMEKRELLKDRTAKVYENAIQTDKRSYTAAQQALQKEEEQFFHEEELVNILPQHLQQMILVALEVYKDKLCYILRIVMDKLTPEQRKKNMRSIKGKDTSIEMILRKALWKKGYHYRKNYKNLPGTPDIALTKYKIAIFCDGEFFHGKDWEILKPRLERGKNSDFWVTKISKNRERDEEINKKLLFMGWTVIRFWGMDIKKNTDECIRVIEEIIFDLKVSEDMGEMDEYVLLTYYAEYLKKIRKVSDSTIKHYQQAMRYISKFLVEKEKIKQSIYEIQNLDELVIIKEYLYSEPEFIELDTRGHRMYSAGFNNYFKFANGKGFENIHQQIGVMDIEIPATNKQLLVADTWRRSSIIKMQSIESAGYECEVNPTHVTFTAKSTGMPYMEGHHALPMKCQDRFKSSLDIYANIVCLCPTCHRLLHYGIASEKANVIDKIYYDRADRLAASGIKVGKNEFENLMECMQSELENIIKELLSKGYEGGYWDYKEDYTSCKEDKLIDIICMANNIEGRDAYLIYGADDNGIVKGIETTTEPRYTTKMVTEFLRTKPFAGQYVPKVSVQVLQIDGHELDVLIVHNTRNTPYYLTDKFNPSHDNKKMLLPGAVYTRINDINTPRIQTASFEHTEYLWRRRFGIDMTPSEKLLRLLDNPEDWSETRWDVDRHSYNIYNPEYQINVLDSQDAYETISYFYDDERMLYAPLKLNYLTTTLYEIELWYMDMGRCLIPKPEHKYDMEHGLYYYYIEKDSLNGKLLPLFAYGKSQCCDRSGREVPIMIFENKEMRTEFESWLANNLFLKEKYIADLENSAIFQHIRGKEEKFGKSACSVLEVAVAFKFYKNWINQREAYQFLASPCQLIFQQFPKLSVTVIHDTKMCIEGKMVPALKLEVNKNAYDVFKREQWMQEHHYRIENRCIVSGQNGKARFCPIRIVNPSYTPDNGQPKTLSNSCTACPYNNKFNLLKGKTCFSTLSVTDKDGNTDSYEPVSTRDINYTDHYQELLTGWISYIQKNYPKYNRYMELIKLLGQEFTLKEASAILHKPQRTLYSWVQTLRPIFKEYMRTIDRIMNILSWAALAVLVYYAFKGWRRGLIMTVFSMFATVIAIALAAQLSPQLSQNWQNTAYFDAVSQRVEASLFKNQDEQEDTDKEHMIDRLPLPDIVQQALANSDDTQKDVLGISAFKAYIANYVTELIFNALSFVLVFFAVSVIMKIIIRCLNLLSRLPVIHTMNKMGGLLVGLLKGMIILWILCIIITILSGTELGGYLFAQINESLFLRYIYDHNYIMMFINGFKDILWGMEQQNKEKRKLKMNRMQWTIVAGVLILAVVLVYALVKNNKVASSYEVVTSMSRGDDTSVYYCMMRKGMVKYSKDGVAMTNKSGSVLWNQTYEMASPTMTSAGDYVAVGDIGANTIYIFNEYGQLGRVSTDVPIQEIQISEQGVVAAVLSDTSSNYINLYDKQGNSLGSIKASLENTGYPLAIALSPDASKLAVSYLIVKSGSMQSRIVSYDFSDVEGDHLLDTQELEGLYPKAAFLDSREVVLFGEKGFVLYQADSKKIETQENFESEINSVFCTNQKLGFIFKNEDDNGKYRMEIYNKAGKKSSTYYFDLDYSGMTADDDEVILYNDEEMLIYHMGGRVRFRGTFNTAVTGVMPSWEDGLYWLIDDQSLREIRIRMVEIKSEENNTVQLPNNIRQVGTPGEKIKIYIEDYVMTYLNQMTGEKPSLQKAALLLGEKVKKESTDIYFISAAVAVVPMEWKEDRFKLSSDEWTALYDKINHYFKNRHILGWFLSRPGQAAAADGEIEKIHSDNFKDKGPIFYTADPLDREDAFYLYENGHLFRQHGYYIYYDRNEAMQNYMIEIRQENQEMREGTPGFQNRLYEKKTDHHIRREAVSGKSKNRNMKWIPQAAVLVLILVAIGIRRNMPGGILPVVQNRVAQETQIETAAANNAEHFDIVESIVQQAEQSAAEKDIRDTEDADQTGTAESSEENQSEEQADAAETTVSSTGTATAGKVYQQYTVKEGDTLLKISRNYYQDAEHVKAIIQLNQIENPDYIYPGMVLKLPMYSSIWINSAQPDAADIFSRNLRYLLNRVNPRGKPLAFACVGSANVPGDSLGPLIGTILTRHGLPNVYGTMEWPLNALTLPHNMPLLKTVEKKYCLIAIDAAIGNPAQSGHLTLTEGALFPGSALRRQLPPVGHLHITGVFDNLTHPSARTLLPAFCYPLTYAILSLQNEAAISHRPALFMAALRENIAEGLPLNDAIESTVTDCINQGVLAELLRAHRAEVTNMLFKEYDSAAHIASEKEISYEEGVQDGIKRGVEQARRQSEQEIAEEKARADKLQIEALVLSYYVQSKSIDEIVSLCEQSSDFVVNILKKYNLRMCMQDNTNYNRNYKDSLFRFIFNNKEAALSLYNAVNDSDYQDADAIEFYTMSDFLYMGMKNDLSFLIDWNLNIFEHQSTYNPNMPLRGFIYTGSAFKKYIEKNHLDMYASKQLTIPVPRYYVFYNGLKKAEDEVVLRQTDSMVGTDAPEKSSAEFTAHMININAGHSTKMIKRCPLLHQMDAYSNQINKLIEELSKLPGIGAKSAQRLAFHIINMPKDQVQNLAGTIVSAREKIRYCSCCWNLTDSELCPICANPKRDHHVIMVVETPRDLAAYEKTQKYEGVYHVLHGAISPMLGIGPSDIRLKELMTRLQGDVTEVIIATNSTLEGETTAMYISKLIKPTGIKVTRIASGVPVGGDLEYIDEVTLLRALEGRTELMAKRGGFPGGMPGNMNNLMKQAQRMQRQMEEAQKELEEKEVEAAAGGGAVKVKVSGKKEIVAVTIDPEVVDPEDVEMLEDLIMAAANEALRKMDEVSQSSMAKITGGLGGGFGFMAYQALYRKWRPSNFDEVRGQDHIVTTLKNQIEMNRIGHAYLFCGTRGTGKTSIAKIFAKAVNCEHPVNGSPCNECAMCRAVNEQRSMNVIEIDAASNNGVDNIREIREEVAYSPSEGKYKVYIIDEVHMLSIGAFNALLKTLEEPPSYVIFILATTEAHKIPITILSRCQRYDFRRISTGTIAGRLRELADAEGIDAEDAALAYVARMADGSMRDALSLLDQCNAFYIGQKLKYENVLDVLGAVDTSVFGSLLKSICSQDVSGVIHLIDEIVMQGRDLTQFVVDFTWYLRNLLMVQSSGDLTDLVEASAEQLEVMRQEASGIDASVLMRYIRIFSDLSGQVRYSTQKRVLVEVALIKLCHPAMERNLDAVLNRLAILEQKVAKGVVVSSQSSGGGAAGGDADGISGLQSGNGVQVQPEQKAVSEDLRMIIDRWKQVTGDLTPSMAVMLRGAVISEGPDNQLIIALADDMRYGYFAEESHRQALENALSERVGKLVKVNAVPLNKTENASQFIDPVQAFQGIDIVYEDMMRVGMLTSGGDCQALNATMRGVAKTLYNADPDTQIFGFEEGYRGLMYNDYILMKPNDFSGILTKGGTILGSSRQPFKLMRVPGENGFNKVEAMKATYRNLKLDCLVILGGNGTQKTANLLSEEGLNIVSLPKTIDNDIYGTDMTFGFQSAVDIATNAIDCIHTTAASHGRVFIVELMGHKVGWLTLHAGIAGGADIILLPEMPYNFDAVLMAVKQRNKAGKRFSILAVAEGAISQEDAQLSKKEYQKKKANSPFPSVSYELGKKIQDALGQEVRIVVPGHTQRGGSPDAYDRVVATRLGAAAGRMILEGKYGCMAAFKNNEIVPVPLKEVAGRLKTVDPKSDIIREARDMGISFGNELMNVKKKEHIFAKIWLIQAKADFLVEFLLILLYSITREEDIFMAPTNSYNADSISVLEGLEAVRKRPGMYIGSVSRKGLNHLVYEIVDNSVDEHLAGFCSEIHVTLNKDGSATVSDNGRGIPVGMHKKGISAERLVFTTLHAGGKFDDSAYKTSGGLHGVGSSVVNALSEWLDVTVRREGCTYHDRYERGVPTIPLEKGLLPVIGRTRKTGTTISFLPDKEIFEKTWFKEDEIKSRLHETAYLNPELTIIYEDKRVTPEEQEVYHEPDGLAGFIRDLNRNKEALHDIVCFKGESEGITVEGAFQYVNEFHENVLGFCNNIYNAEGGTHITGFKSAFTSIMNAYAREIGILKEKDGNFTGADIRNGMTAVISIKHPDPRFEGQTKTKLDNQDAARATGKIVNEEVVRYFDKNLDTLKVVLSCAEKAAKIRKTEEKARTNLLTKQKFSFDSNGKLANCESRNADICEIFIVEGDSAGGSAKTARNRHFQAILPIRGKILNVEKASIDKILANAEIKTMINAFGCGFSEGYGNDFDISKLRYNKIIIMADADVDGAHISTLLLTLFYRFMPELIYEGHVYIAMPPLYKAMPSKGREEYLYDDKALEQYRKTHKGNFTLQRYKGLGEMDAAQLWETTLNPETRILKKVEIEDARIASDITGLLMGPDVPPRKAFIYKHAHDAELDIMQEQIIRTDYAEVMQKSYVDYAMSVIISRALPDIRDGLKPVQRRTLYDMYELAIRYDKPYRKCARIVGDTMGKYHPHGDSSIYDALVVMAQEFKKGMPLVDGHGNFGSIEGDGAAAMRYTEARLQKVTQEVFLADLDKDVVDFMPNFDETEKEPTVLPVRLPNFLVNGSDGIAVGMVTSTPPHNLGEVIDAVKAYMKNDKLTTADLMQYIQGPDFPTGGIVTNKDELLNIYETGSGKIKLRGRVEVEQDKGGKLRLVITEIPYTMIGANIGKFLNDVYALVESKKTTDIIDISNQSSKEGIRIVLELKKQTDVDNLLALLYKKTRLEDTFSVNMLAIADGRPETLGLKSIIEYFLDFQYDLTTRKYQKLLAKELEKQEIQEGLMRATDIIDLIIEILRGSKNIKQAKACLMTGTTEGIRFKSKASERAASALDFTERQATAILEMRLYKLIGLEMDALLKDHDATLKNIASYKDILENHKSMSRVISHDLDMIKKTYATPRKTSIENVGAAVYEEKKAEAMEVVALIDRFGYAKTIDKATFERNKEAALSESKYVISCMNTDKACIFTDTGRLHLIKITDMPFGRFRDKSIPLDNLGNYDSSGENIIHICNLASIQDSMMLFATKTGMLKLVKGSEFDVSKRTVAATKLADGDSIIAICTADNFNQLVLQTENGYFIRFPMMNIPEMKKTAIGVRGISLGSGDSVKSAYPLDSSQECTIIHNEKELLLNKLKLVNRGGKGTKVRIMFNIREMKVEDKAVIMPMVITFYHSPAVEHDVDTAVLERTFDAATDPTMPYISGLVMLEDEKVVGYGYVTGYYASEVGGMCMFMEEMYFTPECRGKGYGTKAYHWIVDHYPEYKRFRIEVTESNVNAKRLYERWGFRFLEYNQMVLDRMNTHPTATLHMANGSKIVIELLPEAAPNTVNSFIYAASRGFMDHHAIQRIVPGNWVDVTYQAFGHKECQYLIPNEFELHPEIEPLDSHPGCVCMGGYGEDGLASCEFFFPLRDCPDHKGIYPVFGKVIEGMDEIWRLEKVKTRPVDFPIPGVEVNEPVEPEVIEKVELDLKGQTYPEPIRMKVQNLPPCWTDMRMKQNRVDRIMAALKEMGLHQMLIVDPMSIYYLTGVYVSPFERFYGLYLREDGHHAFFLNRLFTVPQEVGIEKVWYSDTDPAMEIVAKYLDKDAPLGVDKELKARFLLPLMEMKAAAGFVNASLAVDNTRGIKDEEEQELMRISSDINDKAMAQFKAIVHEGVTEKELADQMLKIYMDLGADGYSFEPLVAFGANAADPHHEPDNTVLKVGDCVLFDVGCIRKGYCSDMTRTFYFKEVSDEHRHIYETVRKANEAAIAKIKPGIPLCELDNTARQLITDEGYGPQFNHRLGHFIGLSEHEFGDVSSVNTDKAVPGMIFSIEPGIYLTDDTGVRVEDLVLVTEDGCEVLNHYPKELQIIGMELKTEILIIGGGASGMAAAVAAAEMGAEVTVAEANAAVGGNGLFPRGIFGVDSKIQRKKLVFADRDQIFRDCMNYSHWKIDGRIIRTLIDKSGDTVNWLMDRGVEFCDVVHHIPNQTPEVFHITEAEENVGHCVIRNLKRICEEKGVRILTGAKGKTLLKDEKASVCGAVCETKDGEVVIKAQKVILCTDGFAGNDEMVEKYYPGFKCELVGQGGGMRHPGDGIRMALEAGAEVEGNFTMEAAAPKIKGYDALNLFLGKPYNVWLNRFGERFADEGIVYNFAVSFNACLRQPDGQVWVVFNQALLDQTLSDGKDMIETIHMPPNVEERLDTTMEQAIADGVLCKADSYEALAAFIGCDAETVKASMEEYNAFCHAGRDGWFAKDKRYMLSMEEGPYYAIKAGEDMLITHGGIRVNERFEALGGDYKPVENLYVAGVDFGGADADVYNVVMSGHGFGFAVNSGRIAGENAVKALKTLMRMLHSLKKMFKSNYLFTFGVIICLFWIIMAIIAPFVAPYDPVVQDLTLRLKAPSAAHIFGTDNFGRDIFSRVIYGGRYSLLAGCLTVVIAGCIGTIYGAIAGYVGGAVDNVMMRLSEMILSFPSLILAMIINAVMGSNLFNTMFALVIVAWPSYARVMRSVVLSVRENEYVTASEALGASRIRILLKEIIPNSITSVLIMATTDIGNQILMFSTLSFLGLGSAPPTPEWGMMVSDGVQYFNKFWVAGFPGLAIFTMAVGANFIGDGLRDLLDPKLRKQFMERLKFIGKRLVYLVIMLFGVATLVFILTKLVPGDPVTANLSQRALGDPQIVAAYKAKYGLDQPIIVQYVYYMKNLLHFDLGTSIRTNNAVLSELARCYPATIELAVFAIILATLFGILFGVISAIKRNSILDQIVRAISVTGVSLPSFWFALLVLYFFYYKLQILPGPGRLGNAFSAPQTVTGFFVIDSLLEGDIPKALDALRHLILPGTVLAAFTMGLITRTTRSNLLDVMSTDYIRTARAKGLSNVRLIIHHALGNAQIPVLTVIGLGFGNLLGGMVLVETIFNWPGVGQFAYQSVLSNDYPSIIGVALLIALNYMIINTVVDILYGIIDPRVRCSMKKKFLAMALGIAVVLSCTACGGGSSDAAAPASGETNAASSEAGSDSAAGGNTTVTVAIGAGFSTLDPGYVYEKYPPLVINACYENLFKFYSNDGAAEPCLADSYEFSDDNKTLTVKLKENVTFASGNKMTSADVAFSINRCKNLQGNPSFICDTIDSIETPDDYTVVFHLTQPDSAILSKLTYSSLAVLDSAVVKEHGGTDAADASSTDTAQAYLDTASAGSGMYIMTSYTPDSEIVLEKNPNYWGESTNVDKYVIKIQPDANTQMMTLSSGDLDIAMNMTDDTMSELTGDNVAKINTATKTVGFLLMNMNEEYGGPVSNPKVQQAIRKALDYTGIQTIVGEGAETPYSIIQDGFMGAKGQRPADYTNIDEAKQLLADAGYPDGFDIDMPVCDLDMEGVLLTDLAQKVKDDLSQIGINVNIVSQPWAAGFGDDYRDGKIGFTVMYWSTDYNDPNVQLEFLPGQSVGLRAGWTTDMDPDLAQLYADTLNATDNDARIAVLEKIQDDTYENGPWLMIAQAPAHIAYNTRLDGVAASDPYSLDLTQITIKMAANDKEVLVKADHVKVYFKGKKRGQTVKAVDDVSFEIMKGETFGVVGESGCGKSTLGRTLIRLQQPTDGHIYLNGTDIAGLKGAQLKEMRKEAQIIFQDPSACLNPRRTIKQILMEPFEIHNLKGKIDVDAKIMELLQLVGLDSYHLSRYPHELSGGQKQRIGIARALALEPQIIICDEAVSALDVSVQAQVLNLLQELKEKLGLTYFFISHNLNVVYQVSDRVGVMYLGKMVEIANYDQLYEKRYHPYTEALLSAIPQVDQEEQKERIHLEGEVPSPYDPPSGCHFHTRCPKACDKCRQTAPELKEVAPGHYVACHLYEMNQSEKILEIKDLCVEFKTVEGTVKAINHLNYTLHKGEKLGIVGESGSGKSVSSLGIMQLIPNPPGEIVGGEILYKGQDLVKKSEKDMQKIRGNEISMIFQEPMTSLNPIIKCGRQIAESLRLHRGMNKKEAMEEAIRMMQAVGIANPEVRAHEYPHQMSGGMRQRVMIAMALACQPQILIADEPTTALDVTIQAQILDLIRGLNEQMNTSVLFITHDLGVVSELCDTVIVMYTGRIVEKAPVRELFSDPKHPYTVGLMSAIPRITKDRPPLETIEGVVPNPTEQISGCSFWPRCPHATEQCKQGEPPVVQLSEERQVRCWLYADAAEKKEGMSFLEYLLRLTAWPMTPPVLYGPFHLLAAFGGSAVAIWAAWLFSPKDHPNTNTRIHQQNFDRIMLISGVILLIGELYKQLMNFYVVNDHVYDWWIFPFQLCSLPMYLCPLLIMIHNEKRHRILCTFLLDFNMMGAVATFIDPSGIFHPYWMLTLHGILWHLMLIFVGFVIIFSHEADLTTRGFLRTLPLFAFFCLAAEVLNGILHRFSAANLFYISPWEMSTQLLFGDIDRILGRPIGILLYILAMAAGAWFIHNIARKITAVCLTAKSLMGEMLNDLIFSVNTILPVFIVVAIGYFMRRRGTVDEHFVGSISNVVFYYALPARMFLDVAGSDFTELMNPRFVFVTVGGTIGVFLLAWLVISHCIHDGRKVAAAVHSAYRGNYIYIGLPIIENILQTDHVACSVLVLTFIMPVYNILGVLILSIYSGDMSGMKPGKLLLNILKNPMILAVIFGVLYAMTGLPLPYAAEKSLTYLGAISTPMALLMIGARMVDNSVKGEGKAIRLALLFKLILGPVVMTLLAIFLGMPTEEIVTVFVLFAVPTAMNVFIMTKSMGGDDGLAANAILASVPCSVIVMTIGIYLMRITGIVMQKLTTIREIFRNRDNYLGQTVEIGGWVRNIRDSKTFGFLVVNDGTYFEPLQVVFHDAMANFSDICHLNVGAAVIVKGQLVATPKAKQPFEIQAETVEIEGASTPDYPLQPKRHTFEYLRTLTHLRARTNTFEAVFRVRSLIAYAIHQFFQERDFVYVHTPLITGSDCEGAGEMFQVTTMDLNNVPKNEEGKVDFSEDFFGKPTNLTVSGQLNGETFAMAFRNIYTFGPTFRAENSNTTRHAAEFWMIEPEIAFADLQDDMELAESMMKYVIGYVLEHAPEEMKFFNQFVDKGLLERLEHVRTSDFGRVTYTEAIELLEKHNDEFDYKVSWGCDLQTEHERYLTEKIFKRPVFVTDYPKDIKAFYMKQNPDGKTVAAMDMLVPGIGEIIGGSERENDYDKLLTRMKELGLKEEDYSFYLDLRKYGSTRHAGFGLGFERCVMYLTGMGNIRDVIPFPRTVNNCELMHNRSKHTYCASLFFLLLILLFGSSCLLTGCSGGTSSKAEANAGHSGGSNTDGSGGSGSDADGSGSDADSSSQKRADAYASLVPTASGETCYGDDSVSIDASNISDGYVMIRYTGRSEKAKAQITIPDGTVYTYTIKGSDYNTFPLTGGNGDYTLKVYEWVVDNSYALAFSKDLSVSLSDEFKPFLYPNQYVWFTGDSQVVALGRELSDQSADDLDYVQNSYYYVIRNISYDNDKAENTPTDYVPDIDTILEEKKGICFDYASLMAALLRSQSIPTKLEVGYSGEAYHAWISVYLTESGWVDNIIEFDGKDWVLMDPTLAANNSSKAVAKYIGDGSKYTVKYSYMNKSPQLKPLSNPELSSFSSQLSLILRSGISALEGISIMLEDASSEEEKAILNALSENLQETGSLNEALEQTQLFPAYMTRMVRIGEETGTLDDVMAALGDHYAREDTIARTIRSAVTYPMIIISMMIVVILVLIIKVMPIFNQVFIQLGSEMSGFSRVLMDLGNTINRYSVVFIAVLAVIVIGFFAYNHTAKGAAFLRGLGSHIPAIRRMHHDIASCRFASGMALTLKSGMAPEECLSLVRELNDDEAFQKELTECEQLLENGTDFTATLHQTGIFTGVYARMASIGFKTGSLDQVMSDIAELYQEDLDNRMSNTLSILEPTLVIALSLVVGFILLSVMLPLVGIMSSIMVRFQNQKKSRKNRRVFLSICVFLVILLLFISGIDSFSDSTRRHQKESLERALNRSIIYCYATEGTYPESLEDLKAHYGLTYDEDLFFVDYQTVGANIYPDVTIIEKGAGKMRFQSRKHHIIDILFPISLYFVFTVSALTVLLLATNVYRTTTENSALNFNANTSLSYITEKIHQNDTEGAVSIGSFDGHQALILKQHYNDTEYVTYIYVSEGNLMELYTKSSADVDVGSGKVILPLQSLDMEMSQSDLLHLTCTDAQGHTVASYISIHSESMKYQRHNNTSSLFLLELILAVLFFSVASALCIQIFTKAHLMSQDARDLNFAVNEVSSMAEQMSDGTLQDAAAYYDSSYASCEKADAVYVLTVHYEPKDTLLKAHISMDTIADTRNIYTLDVTKHRQRRAESMRKQSEKAPAPFFNIGASSLLVIFLILCLVTFAILTLTSAKSDADFAEKLAHHKMNYYAACNTAESTLDKIDAVLADAWQLSDTDTAAVFTEIETQLTALDSREQLQLSMDFTQSEPTISYAVAIDDKQNLCVTLTLTAAPAKGEAYYRISQWQVQSSGEWKGDQTLNLMKMNAREILEQAVREDVSDIFIVAGLPISCRKNGNIIQTQEEKLFPKETEALLNEIYGMAGDRDMMNLLVHGDDDFSFAIPGVSRFRVSAYKQRGALSAVIRVITFQLPNPQELGIPEAVMQFADHTKGMILVTGSAGSGKSTTLACLIDRINNTRNTHIITLEDPLEYLHRHNKSIVSQREIKIDTDNYVTALKASLRQSPNIILLGEMRDYETISVAMTAAETGHLLFSTLHTIGAANTIDRIIDVFPPNQQHQIAVQLSMVLNAVISQQLVPTVDGQMVPAFEIMSVTPAIRNMIRDNKVHQIDGLIATSAKDDMISMDMSLMNLCKQDIITKETALTYASNPEMLKKRLMKKLQDLTIKDAFMFAAVMSDAEQCKLLLALILEMDILEVDVVAEKSLSYHPEYHGVRLDVLAEERGMHRRFNVEMQVKTETALSKRSRYYHAQMDMDALLTGESYDRLPDTYVIFICDFDPFGDQLYRYTARNMIYETNKLLADGNHTIILSTKGKNLNDVPIQLVNFLEYVGQDTDNVKTDDAYLRLLQERVKSIKQDRDWEGKYMLLQEMMSEERMAGRKEGLEIGRRESLDKMNQLIILLSEQNRKDDIIKAANNKEFQEQLFREFHLMAAYLPITVPRAFGYEIYTVISGSMEPAIPTGSLVYVKYIQPEEIQTEDVIAFYGTDADGSIVTHRVVSNSAAMGNFITKGDANSDNDMNLFVLMQKLEENPEITQVKLMEAFDLSRKQIQKIIKDLREEGLVERQGSNRNGRWVVKKYMARRNRQKKSPVAAVCSVLGTLLLIIIVAAYLPITVPRAFGYEIYTVISGSMEPAIPTGSLVYVKYIQPEEIQTEDVIAFYGTDADGSIVTHRVVSNSAAMGNFITKGDANSDNDMNPIPYANYIGKVQLSVPKLGGIFQTITGTNGKIAAVSMIGLAIVLEILAAVLQGKREKEEMKKYKKLFVSLLAAAVLTVGSAFSVMAADTYTYKVTVYAGNKGTIDGQEQKEITGLSLGSQVILDINSVKVTDDKYYVKGFRLSGRDNEEALATPTIEVDGDVDYVVAYGIKGDMVAYTVNYQDANGKTLADSQTFYGNAGDKPVVAYKYIENYIPQALALTKTLSDNESENVFTFTYTPGETDRIVETTTTVTTIVPGPTTTTTTTGTTGTGTTGTGTTGTGTTGTTGTGTTGTTGTAANGTNAANNAAGDNTANGANTNAGGTTDNQNNGQDADNQDNQTTDIPDNQVPETLVDLDDEETPKSNIDAEDGSNTLPMVGGAAIGILSVAALAALFVYLKKRSRMKKKILCLMMAAILAVGAPLTAFARDYQGADGWQATFDGSKLNSNFKDEDVTDSMSEIQPGDSITLHVQLTNQDSSNTDWYMTNEVLQTLEDAQNSASGAAYEYRLTYVDSKNKETVLYDSSTVGGEGSSAAGEGLKQADASLDEYFYLGRLAKGESGTVYLKVGVEGETGNNGYQQTLAKLRMTFAVEKVKEGQTIKKNTVIEKKVPQKNNLTTSRKAVKTGDTSNLLMYSVIGLVGGLIFLIAGIILLNNSRKTRQHREGENMKKNKILFPKKVALLLGAAAVLLLGSTVGSTRAALTYYSENYSAQMNLKHIGVSLVENGQVVSSRDYVSGNEWSGNTEGKLLANMLGEKEKFTPGKQYDEAISVTNSGDIDTFVRVIITKSWKDKEGRKNAELSPDLIELNVPENSGWVVAEDQSTPERMVLYYTKALAPGETTPGLSDTIRIDESVAQQVNKVTDGSTVTYQYKYDGYSFNLDAEVDAVQTHNAKAAIKSAWGVDVSVSDDESSIGFMKKQLKKPFLMMAVTALVLVGTLKVGGAMAYFTTYSTASGSVQMNMGFTQTIPHEEVDSRGKHVSVENTGDYDCFVRVRAFAPSDITLSYQPEDSGWTDGGDGFWYYDQILPAGETTATKLNVSYTFPATDSEDAPAEFNVIVVEECTPVLYKADGTAYADWNNVITADTAEMMKKSIKKSCALLIACALTLSAFAVLPKANAANMVDTGKKDCSIDFKTGGDDKVSADLGTTTVDVKLYKVADISEVGDYTASGVFAQLDVSALDASDSTSADEWLKRATEAVGMVTDSTKPTAEVSLTDGEGKAEDLATGLYLVMADKAQTTNYEYTFTPYLISLPNNYYYQTGDDEWVYELSEVVLKPEQTPRYGSLVIDKTLRDFNATSGAQATFVFQIDITTLEGKTESRVEAMTMGAGEESQQLTIDQIPAGASVRVRETYSGASYTQVSDDPDDVTIFADEAVRVSFENAHDGRPNGGYGVKNNFKLDENKQYQYTGDNVSTDMKKKISAILFGLLFLVGFGILIYPTVSNQWNTYRQSQLISNYQSVVQDMTPEDFTQEWERAEAFNATITQNNLYSDVFGESTTDLQSTEYWKVLNEAGDGIMGYLSIPKINIKLAIYHGTADDVLQTGVGHLNGTKLPIGGESTHCVVAAHRGLPSAKLFTDIDQLRNGDKFYIHVLDQVLAYEVDQILPMVDKDDHETLENALKIEEGKDQVTLFTCTPYGVNSHRLLVRGTRVAYNGEEDKEATISESMVESIKNYYMIYTILGLAVTLLVILLLRFLSKKKKNKQPKEMKKKTYKILIVIIFLAGLSLLLYPFVANQWNNYRQKQLISDYDSIVSAEDAAGEIDYAAELEKARAYNEALLPSILPDSFAIAEATEGEDKAYMDCLNIAGDGIMGIVEIPKIDIKLPIYHTTREDVLQVAAGHLEGSSLPVGGASTHAVISAHRGLPSASLFTDLDKLEEGDHFLIHVLNETLCYEVDKISVVKPEETSGLAVEEGKDLVTLLTCTPYGVNTERLLVRGHRVEYVEQEVEAEKTLFSGISIHTNYLLWVIVGLLVTVAFIVVLYKKEQKLKKRRAEQATDGQEAPVVQDKTVTGDADTETEKKEMKKLKKLFAVMLSLIMVLAMGITSFADTTVQITLNGLEDADTVDILQIIAPNKSTTSGWEFINGAGAKYAEAYNVEDTTANEQAIIWGLIEYQARENGQTVTLPTGVTSIAADATKIAAALEKVESLAGFVPTDFKTKTGVTSAGIYAIKATGSAYTYKTMSAYVSFGNVESANYPELTGTTVTAKKSPLKVTKVTKDTDNAVAIGDIVTYEIEAYVPVIAPSNTDNRTFTITDTITGADYYLDGVGAIKRIVVDDVDRTADFALVPNGNTFTIDFSSLVASSYNEHAGEKIVITYTAKVTDVTVNNEAKGHYANTDITGNEVNLYTGSIELTKVDAADESKTLAGATFNVTKEGIDNPLKFTKVTDGTYKYDPENGSEDVVTGANGKLVVKGLDKGNYHFTETVAPTGYSINTDGLDVALTYDGEKATANFSSTGAQNTVKDSTLNALPATGGIGTTIFTIVGCGIMIAAAGLFFASRRKENRMLSKFNNKKHRRLTALLLCVALMLGSVTSVSADISAADSETEVQSGVQTYTEEPTAEAVSYEAPETQAEVQEETSVAEETEAPAADTQQTEAHTEAATEAYTETAAETQAAETTETEVETETETEVVAQQLEYEDDQVKVHVTASEEGIIPDHASLKVVPLVKQEVTNEMTDEQKQEVEAINKKYDEAEKKLTEKAEKEAYDIAGFLAYDISLVDADGNKVEPNGDVKVTMDYKKPVIAEKVVQTVENSEDIDSTADLNVTVMHLEEDAHGNVRNVVDMVADENEEANIKTTDEQSVQKAEFVSDSFSVFTLTWGRTSVSIKVVDTEGKKIGNNIENKSITAATTLSEIAPIIDGYTFSKATLGSKDGSEMYQVKVGYYYYSYRWMYNTVQATDIWNVFDNTQTIYLVYQKLSGIQITDDIVNSGALKAEYKVDEGQTAPTITSYKWYRADQKDGTYAEVKKVNYQASEIKTNLSEDGKELYPAYDEGARKWYKVEVTLANGTTQESAPFQVTYYNQLQNGSFETPTVTGYYNNQWSNAYYKENKGVWQTTGTGKEGKVGADIEIVKANGSGGASAYSWDRGTYSDGHDWTKAAYDGGQFAELNCEAAGALYQDVLTKEGTSLNYWLAHRARGNNANVTQHDTMFLVIMPTKTAQENNLTTQTKLEGYLSGLGVQYGATDSTARSEQVYNQNGIMVLRVTSSNQAWQYINGINGYTATSSLTRFFFMSGKTASDNNTVGNFLDQVGFSQKLPPVADDEFSLQIRKNFDGLGNADIEKVKDQISFEISASKDDKALTDAEVQTLFGRTTISGSDMKQEMDGTLVYTINNKKIGINDRYKVTITEKNAELKDYTLNASAQTSVQVDGDAAPTITDGSEIVELKGKTTAIISFTNRYEENNFKYINFTKVWDDANNNYQTRPESLNVTLHATYLVTEDGETRTETLDLSGKVTPNATVTLNANVDWKCSWKVPVYYKLDNGTKVKINYSITEGDNNSAYVYEAVTDNGKAIQGNGSAYNKTFNTNGITTESVAGSSSKRRAAAKARTATNQSADTAVLAADNTSNAELGEPAHKKYIAYNEASGDYTLNLDVTGARGSAPGVDVLFVIDTSGSMGTAPSYSWGSTYYNLLPTVKELLTKQDGIVDKIFASKGNKNLVAFVSFSDKDGTKSTSWYETPDKDDFKKKVNKLSATGGTNWTYAMVKARDVLAQKANSGNDKVVIFLSDGKPTYSYVQKNGKWKETGDGSNTENSYYQDAADQVTGSLANAKLYSVYLTSATQDGMKTFSDKLSNSDLVDGTNLDTALTNILNKTIPTYKNVTITDTLSEYVDFAESTPTITVTKKTKSGSETPLAIGTDYIANTSGKTVTVNLLGGRSLEDGSTYTVSFRVKPSDEANRYYATNKSYPNTGDDGTGTTSAGKAGFYSNNDASTKLTYEIDGTTDGEKTASYQKPVVQVTTHTLSYRKVWNHPEGVAEPAQDVILNVNYTDGSTGQVTLTKAGKYSFQETVPVTKSIASITEETINDYEASYSITDNGTNAVVTNNYQKVTASSITVKKEWVGDGPKSDVTVSLYQNVNDGEAKLYETVTLNESNGWTKTWDSLPQYEGSSTGQKTYSYSVREENIPTNYQSSISYEYGKDQITATIKNTYDPNCADENYYIANVLQTEKLHITKIWDDSDNAAGLRPNELSVNVDGMNFTLSGNDNWTKATTILKKKNRSHSATEELTGNNYHQVGNAEITEAADGVSVIFTNKLNTTKITVKKNWNDGNVSDRPNSVKFRLEYRTADTSGNWQEYDVYTLTGEDITDTDGWVKVIHNLPAAYEYRVVELADNGEPATASNYGNYVPTVKQDGTTYTMTNTLKWSAMKVSEEWDESNTNSVGLEGAEFELKLGDTVIATGESKAGGSITWTVKNSNSTTDLYNLNGTYTIHETKAPTGYMLHEDWSVTFTNGLLTTVDGKNITGSAADGVVIKLADKKVYVLPETGGSGIYWFSICGMLLMMAAAWIIYKNKCREVLVKMKGRAKKADTFLVKIMDHEHATWQGKVTWIEGQREQYFRSALELIKLIDDAVEKEQEMEGGNDVEMEMGQNMGQIVRQQNFQRSPNLISICVDEIRNGELSGRLYHCYSEEACPFSNVAHLIELAENLFDQIKFPQASTQMRTFTDKSRKTVQPPEKKKSAEELEKERGKKGTMLLYVQYRQRSTWQGVVKWVEGDQEWKFFSELELFKIINQAIQMKDNLPMLEVKALGGFSMRYGEKTISIGSGKSTKAVKLLQILVCSEGRTVSRERLLDMLYGNEDITDAANNLRVTTFRLKKMLVTAGLPQYDYIQIKSGMYSFAAPMEVVLDADGFVSLCDQADETENAEEKIDLLKKACQLYGGDYLPDFICDGVVLAKNSNYKEKYTNALNTLCELLMDRGEYETAIEVCEPACRMYPFDEWQAIQIDCLMRMKKYDEALKEYENTAKMFVDELGVYPSERMMKLFEQMNGRMNFKTQSLPEMEKRLKETDKGSGAYFCSLPGFRDTYRLLARIVERNGQSVYLMLCSITNGKGQPMKNEERLDMMGKELQDTLAHCLRRGDSYTRYSKSQYLLLLVGTNRENCSLIFERIQKYFSREHKTWSKYLEYAVSSVADSGFNSEDNENKWKWGKTWDKMNTAITNRITAANDKAQYDEYAKQLIAQKLILAYILVQTIDEFKGMQPEDVVSRIEGEPLIGIVPVEPGMTNTSYTHSSGDQLIGLNTENSEINEGMIRFDIIFYVRMKDGLAQVIINIEIQKDEPTQYFLLNRAIFYVSRMVSSQKGRDFVHQNYNDMKRVFSIWLCLNMDSHSMCHIHLTRDDLINHHNWKGNLDLLNIIFLGIGEELPPQEEQYQLHRLIAALLSNQLPAAEKLKIIHNEYHIPLSQPLTEGVNMMCNLGEGIEERTAARVTKEVTKELNAKHAKHAKELTEKLAEKDRIISAYQLLARHTPIAQIAAETGLTEEAIRALMSDIAAVGEKRVFEPFDKEAFKKEILNNIKYLFRKTPETASQQEIFQAVAYASKDMIIDEWLNAHKEYEKQDAKTVYYLSMEFLMGRALGNNLINLCCYKEVAEVLQEMGLDINVVEDQEPDAALGNGGLGRLAACFIESLSTLNYPAYGCTIRYKYGMFKQQIVNGEQVEIPDDWLKNGNPFEIKRPEYSQEIKFGGYVRIEYNEKLGRNVYIQDGYQSVMAVPYDLPVVGYNNGIVNSLRIWDAEPLVQFNLDSFDKGDYQKAVEQENLAKSIVEVLYPNDNHYSGKELRLKQQYFFVSASLQQVIKKFKATHDDIHQLPDKVVFQLNDTHPTVTVPELMRILIDEENLEWDDAWDITSRCCAYTNHTIMAEALEKWPVDLFMRLLPRVYQIVEEINRRFLIQVEEKYPNQYDKIRNMAILYEGQVRMANMAIIAGFSVNGVARLHTQILEERELHDFYEMMPEKFNNKTNGITQRRFLLHANPLLAQWVTDKLGTDEWITNLPLLKGLAPLADDSRARKEFQEIKYQNKLRLAKYIKEHNGIDINPDSIFDVQVKRLHEYKRQLMNIMHIMYLYNQLKDNPDMKFYPTTFIFGAKAAAGYKTAKQTIKLINAVADVINNDPAVNDKMKVVFIENYCVSNAEIIFAASNVSEQISTASKEASGTGNMKFMLNGAITLGTMDGANVEIVEEVGSENAFIFGMSSDEVMGYEANGGYNPREIYEQDADIHRVMDQMVDGTYSNGDTETFRELFNSLINQDVYFILKDFRSYAEARAKINEAYRDSKAWNRMAILNTACSGKFSSDRTIEEYVRDIWHLKKVFVKMYDKVSANQNFVEREQKIEKFWADNMIFEKSIELRQHSPEFTFYDGPPTANGKPHIGHVLTRVIKDMIPRYKTMKGYKVPRKAGWDTHGLPVELEVEKMLGLDGKDQIEAYGMEPFIQHCKDSVWKYKGMWEEFSDAVGFWADMEHPYVTYDNNYIESEWWALKQIWDKKLLYKGYKIVPYCPRCGTPLSSHEVAQGYKDVKERSAIARFKVKGEDAYILAWTTTPWTLPSNVALCVNPDETYIKVKMKEEDYVYYLAQALADTVLGEGTYDVLETYKGTDLEYKEYEALYPVETKKKAYYVVCDSYVTMTDGTGVVHIAPAFGEDDSKVGRKYDLPFLQMVDENGMMTKETKWAGHSCIKRVDLEGENGVSPEVIKDLKERGLLFSAPNFEHSYPHCWRCDTPLIYYARESWFIKMTAVKDDLIRNNNTVNWIPESIGKGRFGNWLENIQDWGISRNRYWGTPLNVWECECGCQHAIGSIAELKSMSDNCPDDIELHRPFIDAVTIKCPECGKEMHRVPEVIDCWFDSGSMPFAQHHYPFENEKLFKEQYPADFISEAVDQTRGWFYSLMAISTLLFNQSPFRNVIVLGHVQDENGQKMSKSKGNAVDPMEALREYGADAIRWYFYSNSAPWLPNRFHKKAVLEGRSKFMGTLYNTYAFYVLYAEIDQFDPMKYTLDYGKLSVMDKWLLSKLNSTVKAVDANLAAYKIPETAKVLQEFVDDMSNWYVRRSRERFWAKGMEQDKINAYMTLYTALVTICKAAAPMIPFMTEEIYRNIVVNVDKNAPESIHFCDFPEVNEEWIDTKLEEDMDHVLQIVVQGRACRNTANIKNRQPIGKMYVKAAFELSDFYKDIIADELNVKEVVFTDDVSAFTSYSFKPQLRTVGPKYGKKLNAIRQYLGSVDGNAAMNELKTTGKLTFDADGDQVELLEEDLLIDAAQMPGYVSDTEYETTVVLDTNLTPELVEEGFVREIISKIQTMRKEAGFEVMDHIRVYFAQNDKIKTLVDSNNAEIKDEVLANEICFDTIKGYNKEWNINGETVVIGVEKENAMYSLNHLYDILTYAFPVTEENPAQLTRHPASLLTCISMPKTKLQNVFFTILMAFLMVYAMICYNISLNIGGMTNQVFLMAFGEMKIMWPAAIILEFFVVEKLSTMLAFRIVSPQDKPIFITLAISSMIVCLMCPMMSFIATLLFKNAGSNFIAVWFQTTVMNFPMALCWQIFGAGPLGRLIFRTVMKAMGKQETPAADRAESCMNKHNEIKWGLIPHSYYNIPTKIYKSFYEQNTEKFLGIFPYGQNLVKMHRKDGQWRNTNRNYTENGFMMKKTLTKGRKLMYRGDDILKIYDQDLNNIGRATREEVHTQGLLHQVAHVWMFQPKEDDTYILIQKRSLDRELYPGKYDLIQTTHFDPDESYEEAIVDSLEYYRGLKESKEDIIHVGSTHQQIDAGDYHDNALVQVFAIFTAKALFIMPDTEEIVKVRFEDFRQLIHGKQNTIKLYSLDDVYLKESSADEWWLRKDEFIDVVEPYIDSRIEELMLFGKNPQLYFPRARVRFIRYEGIRECVGAQMNVIKDVIFEGNILNMLTKAISYLDTQIKEKTYLGADGLFVTEEEYPKFVRQEIIVNAITHRDYSIRGTDIQIKMFDDRIVVESPGRLPGLVKAGNIRHTHFSRNPKIAEFLRDYNFVKEYGEGVDRMCRELEAVGLQSPEYRVNAFMLQATIRNRLASEGKAVFEAENHGLVREKPLFEEENHGLLKEQSLFEANNDGFANEKSMSEQKAQLLEIVINAVEDKRISSTIAGNVKEVLETFAFDQIFGRKEIKSALHYGDYRAGSTIEIMHQLELIEPVKGHGKGKYRIKMKGIVLMYFLSETDTIKRVKCFRKKVTGQCPFYSIKKIILMKKRILPLLLTAAMVAGLAGCGSSAAKETTAASDNNQTTAESTEAGSTTGEKILKVQVGPDPETVDPALNSAVDGGNMILHAFEGLLTLDENGQLKEGQAESWETSEDGLTWTFHLRDGLKWSDGTDLTAKDFVYSWQRVCDPNVAAPYAETVLGMVKGYDEAVAGDITKLDVQAPDEKTVVVNLAHPCSYFGELAAFATLNPVQQATVEANGDAWATSADTYISNGPFMMTEWVPGSHITFSKNPNYWNAEAIKLDKLEFELIEDSNAAYSAYTSGEVDMIKDVPTEEIPSLQGNDDFHVEPIIGTYYVSLNLQKEYFQDARVRKALSLAIDRNYVANTLMQGTYSPASSIVGPGWLDTDGSSFAENANGGTPYIDNDNFDANLEEAKKLLEEAGYPNGEGFPQIEYTTNDAGYHKVVAEYLQQAWAAIGIDLKVNIVEWASFTPMRRNGEFDVARNGWVGDYTDPSNILELFCTTNGNNDGKYTNADFDAAIEDSRVTTDAATRSADLHKAEDALMNDAGCIPIAYYNDFWLQSSKITGSWHSANGFWYFMYADITEMSDKLVQVEHLQQYFPAGGFGKNKKYVQAVDDVSFFINRGETLGLVGESGCGKTTTGRTLLRLYEPTGGRIIYDDKVIFDKEKKIAENMLPYRKKMQIVFQDPYASLDPRMTVGDIVGEPIDIHHLASSKQERYDMIIEMLRRVGLNSEHANRYPHEFSGGQRQRVGIARALAVHPEFIVCDEPISALDVSIQAQVINMFEDLQESMNLTYLFIAHDLSVVKHISNRIGVMYLGRMVELADSYELTMHSLHPYTKSLISAIPIADPKQARASKRIALEGDVPSPLNPPSGCRFRTRCPYADEQCAKEVPEFKEVAPGHYAACHHLDKCNMSEYLVDIQHERLSFFTPAGEVKALNDVSIHLNDGEVLGIVGESGSGKSVTAYSLMGLTAYPGKLVGGTIDFNGHRINDLSEKEFRKIRGNEVSIIFQDPMTSLNPVYTIGNQIMEVILLHTDKNKEQARARAKELLELVGINEPEKRLKQYPHELSGGMRQRVMIAIALACEPKLLIADEPTTALDVTIQAQILELMMELKEKLGMAIIMITHDLGVVASMCDKIAVMYAGRIVEYGTTDDIFYNPKHEYTKGLLKSIPRLDAKEHERLVPIEGTPIDLLNPPAGCPFAPRCSNCMKICLREMAPVTTFDDVHYTQCWMNQKEQMEREAAKMEKNPLSFQLKLNPDDFLPATDEEKESLVVMRDSVSFWKDGFRRLRKNKVAMVCLFIIIIVMIFAFIVPAFYPYSYEQQIQGANNLAPMQYSAKEMEQIAAGEKVFPHFFGTDKMGRDYAIRVMMGSRISLLVGIIAAAIILVIGSIFGSIAAFAGGWVDLIMMRIVDIIYTIPDVLLIVLLSFALKAPLKVLAQAPGFGWISVVGENLISIFIVFALLYWVGMARMVRSQILMLKESEYVTAARALGASSARIIKKHLLTNCIGTLIVTTTLQIPSSIFTESFLSFLGLGVAVPMPSLGSLASDAINGLNTYPYLLFIPAAVISLIILSFNLLGDGLRDAFDPKLKNMGKYILKRIALAIVTIWAVATITFFLMNLVPGGPFLSEKAISPAATKALEAKYGLDKPMAERYFTYISDAAHGDFGDSLKQRGRTVMDIIATKFPVSARLGGMAVVLALCVGVPLGVLAAYKRGTFIDSLFSVIATCGIAVPGFVICTLLLYVFGVKLQWLPTLGLKSAQSYIMPVVALAAYPTSYIMRLMRSSMLDVLGQDYMRTAKAKGLSQKVSLFKHALRNAILPVITYVGPMLAYTLTGSFVTEKIFTIPGLGGEFIKAINGRDYTMIMGTTIFLATIMIVMNVIVDIVYKLVDPRIKLKMNYNEVLANARENIGKLCKACPVCNGLACRNTVPGPGAKGVGDTAIRNYQKWQEIRVNMDTLCAPKTVDTSLELFGKKFKYPFFAGPVGAVNLHYSDAYDDVSYNKVLVSACAENGIVAFTGDGTNPKVMEAATDAIALADGMGVPTVKPWNLDTIREKMDLVKKSGAFAVAMDVDAAGLPFLKNMDPPAGGKSVEDLKAIAEMAGAPFIVKGVMTVKGALKAKEAGAAAIVVSNHGGRVQDQCPATAEVLPEIVKAVGGSMKIFVDGGIRSGVDIFKALALGADAVIIARPFVTAVYGGAEEGVKAYIDKLAGELADTMAMCGAFSLHEITPDMVRMLIFRLFWEFFKTGLFAIGGGLATLPFLYDMQAATGWFTLDDISNMIAISESTPGPMGINMATYTGFTSMGVLGGIAAVAGLVTPSIIIIIIVSNILEKFKTNKYVQYCMYGLRAASVGLISVAGLRVAEAAFLRSQLFAETGSLTDLFNIKAFIFGVVLYVVYKKTGKHPIIYILASGVIGVILSLMKELWELFIVFAKIGGFTFGGGYAMLPILQREVVENRNWATSEELMDYYAIGQCTPGIIAVNTSTFIGYKRKGIIGGIVATIGCVFPSLVIIMIIAAFINSFTHIVWVQHALAGIRVCVCVLVLDAVIKLAKKSLIDAATYLIFAAVVVLSLFTDAASFVWIVCAGAAGVIIKTLMERSKAQKKAMTLIQLKYFQTICKYNNITRASAELHVSQPSLSNAVKELEREFGVSLFTRRSRGLELTPEGRYFLDEADKLLEQAEQLTTNMKHMSTTDRTLTLGLPAMSGSLVFTDLLRTLYARSPGTHIQVMENGSLANRSKIMDHTLDAAIITRNGPLPPGIGHVTLRHVNICLYLSVMHPLAEKDTVTTDDLDQLPLAMLPEDTFLDHCIDQYYETLHLKPSIIVRTNQLATIQQLVATNTTAAFLLDHVLEESSDIVKRTVPGLLPAEIDLIWKSSRHLSPHLKNLITAARNIMGEVQIKPFKRVLVANRGEIAIRVYRALNELGITTVGIYSKEDRYALFRSKADESYQLKENKGPVDAYLDIKGIIEIAKKANVDAIHPGYGFLSENPDFVEACAKAGIVFIGPSEDIMNAMGDKISSKQMAIKAGVPIIPGVDHALKTEEEVMKVAEMVGYPVMLKASNGGGGRGMRIVNSAEDMPKEYREACNESKKAFGDDQIFIEKYIRGPKHIEVQVLADNYGNVVHLYDRDCSVQRRHQKVVEYAPAFSIPESTRQIIFDSAIKLCKQVGYRNAGTLEFLVDQEGNPYFIEMNPRVQVEHTVSEMVTGIDIVASQILIAEGYPLNSPEINIPSQDAVKCQGFSIQTRVTTEDPSNNFLPDTGKITVYRSGSGNGIRLDGGNAYAGAEILPYYDSLLVKVITHDRTFDGAIRKSLRALKELRIRGVKTNVPFLINVINHETFRAGQCYTTFIEETPSLFQLQRSQDRATKIIEFLGDRIVNTTGGDKPFYENREIPQFDEEKTVYGARDEFLKLGARDFTQKIL

SEQ ID NO: 1 - protein, 1048386 aa, Coprococcus catus (residues 698,925-1,048,386 of 1,048,386)
  misc_feature (108137)..(108140): Xaa can be any naturally occurring amino acid
  misc_feature (108150)..(108153): Xaa can be any naturally occurring amino acid
  misc_feature (110019)..(110022): Xaa can be any naturally occurring amino acid
  misc_feature (116209)..(116212): Xaa can be any naturally occurring amino acid
  misc_feature (882802)..(882805): Xaa can be any naturally occurring amino acid
  misc_feature (947835)..(947838): Xaa can be any naturally occurring amino acid
  misc_feature (1006423)..(1006426): Xaa can be any naturally occurring amino acid
  misc_feature (1014059)..(1014062): Xaa can be any naturally occurring amino acid
  misc_feature (1031697)..(1031700): Xaa can be any naturally occurring amino acid
  misc_feature (1033187)..(1033223): Xaa can be any naturally occurring amino acid
  misc_feature (1037812)..(1037815): Xaa can be any naturally occurring amino acid
NDKKLYVTDTTMRDAQQSLMATRMRTKDLAGAARATNAFMQNAYSVECWGGATFDTAYRFLKESPWKRLEILRERMPNTMLQMLLRASNAVGYSNYPDNVVKNFIDVSSKAGIDIFRIFDSLNWVENMKMPIEEALKTGKIVEGTLCYTGDVTNPNEKKYTLDYYVKKAKELEALGIHTFCIKDMAGLLKPYAAKELIGALKSELKIPVHLHTHDSTGNGVATVLMAAEAGVDIVDLAIESMSTLTSQPSMNSVVAALQGTDRDTGLDLDELSELGRYYGRVRKVYKQFESGMNAPNVDIYKYEIPGGQYSNLLAQVESMGMKNQFEEIKELYRQANDLLGNVTKVTPTSKVVGDMAIFMLKNGLNKDNIFELGQDLSFPASVVDYFKGMIGQPEGGFNPELQKMILKGEKPITVRPGTLLPDVDFDAVKAMLKDKYDLSDFSDYQLDLKAVSYALYPKVYEDYCEHFQAYNDVTRLESHVYFYGLRRGEETTLKIGEGKDLLIKFMEMSAPDEEGKRVLSFEINGSVREVTVQDKKLEVKSDKKLKADKSNPAHVGSTIPGTVSQVFVKEGEEVKQNQPLLVLEAMKLETTVVAKQDGVIDKIYVAAGDRVNTGDLLLSFQKMSSFEKNLSEGNVAKQLVLFSLPFLASNIIQSLYSVADMLIVGRFSGTTSMSGVNLGSQVTLILTNIVVGLCAGGTVLIAQYLGAKRRKDMQETTATLLTTLTIAAVAITVLMLILKKPILHLIQTPAESFAEADRYLTVTVLGLIFIFGYNVFSAVMRGMGDSKRPLYFVLIACITNVILDLVLVAGLKMGALGAAIATVFSQAVSMITCIVVMIRNDFVFDFKPSSFIIKKEKAIKILKLGTPTAIQNGVTSISFMIITTLVNIIGGVNASAAVGVVAKFNSFAVLPAVAMGASISTMCAQNIGAGKWDRAVKTCKIGTVIAFCISGCIFIVAQTSFEHILRLFNDEPEMLKYGVQYIRTFSFDYLLMPFVFCINGLFTGAGHTAFSMVNNMLSAIVLRVPVAVAFGLVLNLGLTGVGLGGPMASVGAIILIVVFLISGRWKENKALMKNKTAFTILTILVLSFLLYLSGGIFVHHGSAKNSESIAADIDLLTQMEAKTPTDFSSRKIENFSGDLTEEQEKIIAMKDDSFDNSEMTKWFEDVIILGDSIVEGGSAYEWLTPSNFSSKIGISVCTAEEQIDAAINASPSLLFMCFGVNDIENYGSQVDGFISDYREAITKIQGATPHTVIYVNAIFPPQDGVQDRLPFYGYLDEYNTELEALCQELGVTFIDSGFILRELPELYDADGIHPVSAFYPLWFNYLADMAGLKDNEMNRLKKLTYIQYIICGLLVIFILGILLSGHAKNVSFETVQQNIVSCEGINTLKKGTARDMRKNLDLDESLFDWSIYYCGNGLMDVSELLIVKSDNSAALETAEKAAASRLDAQKTNFDGYGTNQIDLLGHAITKKVGPYYFYAVSEHASTWEEVFMGLVKMVFSSLNFLLIFLPIVLLLHSVLPFKYKNIVLLAASIIFYAWGEPVYVILMILSIGFNYMSGLVLGELEDPHLRKRQLIFAVAVNLLLLGFFKYAGFLVSMINAILPLKIEFRSLALPVGISFYTFQALSYVIDVYRKKVKPQENLLNFAVYITMFPQLVAGPIVKYSDIELQLSNRRISRAKFGQGIERLLFGLSKKVLLANNLGLLYETIQASGSRSIMTSWLGIFAYTLQIYFDFSGYSDMAIGMGKMLGFTFPENFNFPYISDSITEFWRRWHMTLSGWFREYVYIPLGGNRVSMPRHILNLLIVWVLTGFWHGAAWNFILWGLYYGILLILEKYIFAPLLKKLPKAARHIYTMLLVMFGWVLFSNTDFGSMRTYVGTLFGIGTKGFLDLAFFYYIRNNLIILIMGVLCATPLIRNYIVRCSRKKPEVTSAVLLLLGILSIAFLVYGTYNPFLYFRFMQKRKDKINRKKYHSILVIAAIAIVVLLDAGMILMPDHTSSDMENRTLQTFPKLTFSTLVSGKFESEFETYIADQFPFRNKWITLESTVSRMMGKTESNDIFLAKGGYLIQNFHTPSDEQYASLLEGYKGIAKLTEGTDITLNAMIVPTAVNIYSKKLPFGAVKGDQKAFLTQLQSDLAASGINWIDLSEPFAACDKATQLYYRTDHHWTSDAALLAYQTYNKTLGLNDSTTYSKKILSDSFKGTLSASSGLRTSETDEIYAYLPDQATDYTVSLTAENTKSASVFDVQSLSTKSQYNVFFGGNHPEVVIDSASESKKVLMVFKDSYANCFVPFLIPDYARIIMIDPRYYTEDISETIQSNGVTDILFLYNANTAAEDHSLYQLTAQMDLNKFTQKSLQAVQDCQKLAYQYGNQKIEQEHLLLSLLTQEDSLIDRLLAKMGINHEGFKVQATKLVEKLVKVSGGQVYVGDNLNRTLVRAEEEAKQMDDEYISVEHLFLALFETADSDIKTLFRNFEVTRDGFLQALSTVRGNQRVTSDNPEATYDSLSKYAEDLVGKARAQKMDPVIGRDTEIRNIIRILSRKTKNNPVLIGEPGVGKTAVIEGLAQRIVKGDVPDGLKDKKIYSLDMGALVAGAKYRGEFEERLKAVLAEVKKSDGEIILFIDELHLIVGAGKTDGAMDASNMLKPMLARGELHCIGATTLDEYRQYIEKDKALERRFQPVMVDEPTVEDTIAILRGLKERYEVFHGVKITDGALVAAATLSHRYITDRFLPDKAIDLVDEACAMIKTELDSMPTELDEISRKIMQLEIEEAALKKEDDKLSQERLQNITHEIAELREDFKVQKAKWDDEKQDVEKLQSLREQIEDLNKQIELAQRNYDLNKAAELQYGKLPQLKKQLEEEEARVHGEENSILRERVTDEEIARIVSRWTGIPVAKLTESERNKILHLDDELHKRVIGQEEGVSKVTEAIIRSKAGIQDENRPIGSFLFLGPTGVGKTELAKALAENLFDDENNMVRIDMSEYMEKFSVSRLIGAPPGYVGYEEGGQLTEAVRRKPYSVILFDEIEKAHPDVFNVLLQILDDGRVTDSQGRTVDFKNTILIMTSNIGSSYLLEGIDSEGNISDEARQNTMNDLKAHFRPEFLNRLDEIIMFKPLTKDNISGIIDILIGRLNKRLETKELTLQLTPAAKDYITDHGYDPVYGARPLKRYIQKNVETMVAKMILGNELEPGDCINVDADANGLTTTTTHIEDMKRIKSACITQTLCFSNYDGETTEYAKKAIVQEYEKYKAQLKKNGTKYKILSEKTNEDGSIVIEVKKQYNSSPVGEYLNMTKRIITISREFGSGGRFIGEEVAKKLGIAYYDKNIINEIAEKSGLSPEYVLENAELSPKKGLFAYAFAGRDMTGKSVEDMVYEAQRKVILALAEKGPCVIIGRNADYILKDRDDVMNVFIHGDMPEKTQRIMRLHNVEAQEAAKMMADTDKRRMTNYNFYTEQKWGYAGNYTLCLNSSQLGYDRCEKIIMECYMAESNKMKDMPVNKLMVQMGIPMILSMALQAVYNIVDSAFVGNMREGSEAALNALTLVFPVQMLMVAAGIGTGVGTNALLARTLGQGNSKKAAKVAGNSLFLGVIIYVVCLLFGFFGVRAYISSQTVDTEVLEMGVSYLRICCVISFGIVFFSLFEKLLQATGRSLYSTIGQVVGAIVNIVLDPIMIYGIGPCPEMGVKGAAYATVIGQVASAVLLFIFHMKLNKEFEHDVKYLKPNAGIIKEIYAIGLPAIIAQALMSIMVYVMNLILKFNPSAQTAYGLFYKVQQFVLFLAFGLRDAITPIIAFAYGMRSKKRIQDGIRYGLIYTIALMILGIAITEIFPGAFATLFNAGQSREYFISAMRVISISFLFAGINAAYQGIYQALNGGVESLVISLLRQLIIILPLAGIFSLFVRNGQMGVSLIWWAFPITEVIACLVGYVFLNKIRKNKVAVLSMIHIRLASKEDIQNIMPLYAYARKFMAANGNPHQWNGNYPASEDILKDIANGNYYVCTPDNAPEKIVGGFAFIIGREPNYAVIENGAWHSDQPYGTIHRIASNGQVKGIARACFDFCHNKIDCLRIDTHADNKPMQNAIDSYGFRYCGIIHVADGTPRNAYDLVMIVATVFGKIISIFIIMIVGVICCKMGIIDDYTKQRLSRLSTLVVNPILIFTSFQMEYDSELLKKMGLLFVLAVISYLISIMIGHFLLHEREGYDLSIEKFAVTYDNCGFIGVPLGYALFGNIGVIYATVFVAVFHIFCWTHGIMLLDKGGFQLKKLINPCLIAVIAGMVFFIFQIRLPESIDFAMGAIGDMNTPLAMLLSGAIMTQLNFKEILTKRRLFFVALLRLIVSAGLFCLLLRFLPIDDQMRTVAAVTAACPAGAMTITMAIMYERDDHYATELFTVTTLLSILTMPLCMLIAGMCMYCKNNTTVNSTTTHVVNYKDCIIVIKNVPCLECEQCGEKYYTDEVADRLERIVDMAKKLMQEVTVIDYPKIAMKRLENKTAIVTGGNSGIGKATAILFAKEGADLVLCARRKEALDEVAEECRKYGVQVVTVKADVSSHEDCSAVVKAAVDTFGKVDILVNNAGIVDKHRPITECTDEWWNEIIAIDQSSLFYMMKDTIPHMMASGKGSIINVSSIGGVFGNGGISYSAAKSAALAMTKNVAIQLAPNGIRCNAVCPGPTPTPLNTPEKVAEFSTWFAERCAQHMDMSLPESSVEDQANAILFFAEDASAAVTGQYLIVDHGTTLMKIFKEFEGKTAFVTGAASGMGQAAAICFGVLGCRVAVAARNPKALETVQTIRENGGEAIFVECDVTDDDSVRKAIETTVKTFGSLDYAFNNAGCGADGKNIPFAPLTEVAESDWQKVINTNLTGVFHCMKYELLQMQKQGRGAIVNNASIGGLRMAPGFGAYGPSKAGVIAITQTAALENADKGIRVNVICPGPTEGTGLMQDSIDAGAQDAEFLKNHIIPMKKMGTTQDVADAVVFLCSDMAGHITGMAMPVCGGMQMMDFTVLKYFQAVARNGNMTKTARELYITQPNLSKRIAQLEEEIGVPLFEHRKGKIVLNDYGRIFLSSVDIAFAELKAGMENVQRTYTLNQNILSLGSNILHYLAIRLPRFSEAHPEIGIRQLDFTTLELVQNLLDRNINYALSNEMIEDERIDFQLIDSNPYVFVMHKNHPLAECGKLSMGQLKEATFICDTFRFQLSQLYQACRVYDFVPKVGYEVQSNELMYNLLNDNRGVAIIPIVMACEMLNLHPDSDIRICTITDDIAPAIIGIGRLKNQADTQAGQYFIEFIKEGLVREKEVIKKFGYGYLIGEADENIMNQNLYPHLFQPLTIRGVTLKNRLEYAPTVVLKCNADGTVGQDMLDFMAWQAKTGAGWVTVGDTPVTHDKTSHWLCEMNVCDDDCIHGMNALAEVCRQNGAEISAELAYAGRGNRAPQDGSPIAIVSAERPLNPEDNVRTMNRQDMDEMKAHYADCALRCKHAGFRMVMIHCAHQNFLAQWLSPASNVRTDEYGGSPENRRRYPLEVLKAVREAVGEDMVIEMRVSAVEGIPGGMEFEESLAFMKEAQEYVDIVHVSQGSIFHLSARYCIPTYFREPHKPLNVDYAAEVKKHLHVPVAVVGMITTLEQAEEIIASGKADIVAMAKSFMADGDIVRKSLRAQQAEIRPCTRCDLCGNANTWGTNMSCAINPRCGVSGQIQPVSENERKKVMVIGGGPAGMMAAQTLVQRGHSVKLYEKSYRLGGLLNDACLVPFKTLMREYLDWDIRETGKCGAEILLNTEVTEDLIEKENPDAIIVATGSVYVQPPIPGIENALSVRAVDAHEVETGENVVVCGGGITGLECALTLAKEGKSVTVVDQLKREDFIMEMPIFNKVDLLDQLENLNAALIGGQRIQAVKDGVETVDTVTGEKHFYPADSVVNALGVKPDDSLGKVLLAKYGSADVIMVGDCTARGGTYYRANHEAYYAAMRIMLPSIFNNNLFDDFFGFPFYYDNRAEDKAEKKLYGHHAGNLMKTDIKELDNGYELEIDLPGFKKDEIKAELNNGYLTVSAAKGLDEDKEDKKTGKYIRRERYAGACQRSYFVGEDITEEDIKASFEHGILTLFVPKKEAKPAVEEKKYISIQMLMPSIFGENLLDDFFGFPFDGDYNYNAAGLMTTDVKDTDHGYEVTMNMPGVKKEDVKAELKDGYLTVSAVSNKQTDEKNSEGKYLRRERYSGSCSRSFYVGEGVKQEDIKAKFEDGTLKLEIPKEEAKPAVEQKKYISIEGMSDNPEEATFSFAHATIPLVWLQMKFFLLCMTRRVHKMFTKNMNRDTLKQIMIDQKDIYLNNPLITRQYSLETNVNYCFVGIRRTGKSYMMYQQIKQLEDNGIPLSQIVYVNFEDERLLEMTAEDLNLILEIGLEISGTDIKPYLFLDEIQNINGWEKFVRRIADMKYRINITGSNSKMLSSEIASTLGGRFVIMNIYPYSFSEYLIANNMTKNYLDVISTKDRADVQNQYNKYVTYGAFPELVEIRNKRAFLNSIYQTVYLGDIITRNKITNDFAIRLILKKIAESVTKPLSYNRLTNILKSGGMSIGKQTVINYVSYMTDSYLLFTLQNYAAKLVEKETSPKYYFMDTGLLGLMLLDCKSAQLENLVAIELMRRYGTENVYFFENNVEIDFYVPLDNLAIQVSMQVLDNIDTRERETRAFVKLNNFIPNAKCILITNSEETVIDCDGINIEVIPIWKWLLDNMSVIFLHPDGDIAGRTTMSGSEIRKMLPAEALVRAISQTTGMKFGNVKVGFDSFLTVMAVPNIYLYENGKCYDASILINRDGQITEIQKMVHVTQADMVHNARIRDTYVPIEESWLAEFQKRFPDYELPTSDIAPYSQFGAVIFFSCFETNLSDEDIWTIVEIIINDDDSDRELLYTKMRKKAAEENNRFYILENLMRKNLQLNPQGDGLAFLAMISWGCYSALIKKIGEWEYPIVAVTRRVYFYGILFLIPVLIQQKASWKPEILMKPEVLANFLFLVLHEKMTMASVAGAALIFIGLVISQKKNSLFLTERKIITCSNVSNLQHKFAQLHCRAILQIHSSMFICATKMKRKMFYKKDYVKELLKIIRTETDTTKLPKLLSDYHEKDIAEAITLLSETERRQLYPVLGAQKVAEIFSYLDDSEKYIEELPIEKAAKVVSYMDADDALDILDDLTEHKKQELVNHLDEDTRKDVRRLLSYDDDEIGSCMTNNFICISDKLSIREAMSTLVRQAGEHDNISTIYVVDKDEKFVGAIDLKDLIIARENDALSDIISRSYPYVCEHEKINDCIDKIADYEEDSLPVLTKEGRIIGILTATDIVELVDDAMGDDYAKLGGLTSEEDLNEPTIISMKKRLPWLIILLFLGMGVSSVVGIFESVVAVLPIVICFQSLVLDMAGNVGTQSLAVTIRVLMDENLNTRKKLYLLGKEMRIGFFNGISLGLMALVFLGVYIHFFKKYAWLSAFLISGCVGLSLIVAMVVSSMIGTIVPMFFHKIHVDPAVASGPLITTVNDLVAVVTYYGLAMVFLIDVFHIMKLGIEFSRKLSLAYESMCKPLCHELKLPQTAFDILMFLANNPEFKTARDIVEVRKLKANLVSVNIDKLVNEGYLIRKNVEGDRRKVQLLCTDKAQPIISRGQQLQEHFVEQLFADIDDATRQTIFQGMQQMELNLNLILEDNMHLLFTIIVTFFAGMGAGLGTGFAGMSAAAVISPILITFLGIDPYMAVGIALSSDVLASAVSAYTYGKNKNLDIKNGLIMMVTVLIFTVVGSYISSLVPSATMGNFSVFMTFLLGIKFIVRPVMTTKEAMQGVSAKKRAMQSVICGIIIGFICGFIGAGGGMMMLLILTSVLGYELKTAVGTSVFIMTFTAFTGAVSHFAIGGLPDPAVWILCIIFTLIWARIAAVLANKATPKTLNRATGVILVVLGVVVMAFSFLSMLYIGIDLGTSAVKLLLMDETGDIKKVVSREYPLFFPQPGWSEQHPEDWFTQAMDGLKELTAECDRSQVAGISFGGQMHGLVVLDADDAVIRPAILWNDGRTGEETDYLNTVIGKDKLSAYTANIAFAGFTAPKILWIRKHEPENFAKIVKIMLPKDYLAYRLSGIFCTDVSDASGMLLMDVKHRCWSKEMLDICGITGEMLPKLYESYEVVGTLKKEIAEELGFSENVKIIAGAGDNAAAAVGTGTVGEGKCNISLGTSGTIFISSEHFGVDEYNALHSFAHADGHYHLMGCMLSAASCNKWWNEEILKTKDYSAEQTGITKLGDNHVYFLPYLMGERSPHNNPDARAMFIGMSMDTTREEMTQAVLEGVAFGLRDSLEVARSLGISPERTKICGGGAKSPLWRQIIANVMNLKVDVLENEEGPALGGAMLAAVGCGEYPNVETAAAKIVKVVDTVTPEPELTRKYEERYQYFRRIYPTVKELFMLKREDILELLKYGERITLECKDSRNEISKSVWETYSAFANTCGGTILLGIEEHMSETNIQKRFSFTDVKNPEVRLKEFWDTINSNKVSANILLDDNVGYCDISGHTVLWIEVPQADYRHKPVYINENPIKGSFKRNHEGDYHCTEEEVKAMLRDSSDSGIDGGLLDGFTMEDIDLNTLKTYRIEYERHNPDHVWNNAEDKEFLRNLGAYTVERTTKREGLTTAGLLMFGKGLAIRERFDNIRMDYLDQTNLSENIRWNDRLTYDGSWENNLYNFIKRILPKLVSDLKRPFKLDGMIRIDDTAVHKAVREATVNMIIHADYHSTGVLKVIKYEDGFLFSNPGNLKLPVQAIYEGGHSVARNPKIQNMFRMIGLGDNIGSGFPTILNAWGAENWRKPDLYDDQELHQVELRLWMVSLMPIECTEYLYNVFGKDYQLLQAEEQIILSTAYLEEKVSNTRLQSVLNLSSIEVGRLLADLVEKNMLIVENRGRWTTYYINVKYESMPKQLNFNDMTDEIVDLNRTDKLIYQYVRANGMITTQQIVDVIDTISTIQGASVAINRLIKKELLKKNRHGRHVFYTLQMSNMPEVKLGVVAVSRDCFPESLSVSRRQNLMKAYTEKYGTEGIYECPVCIVESEIHMVQALEDIKKAGCNALCVYLGNFGPEISETLLAKHFDGPKMFIAAAEESGDNLLDGRGDAYCGMLNASYNLQLRNIKAYIPEYPVGDADECADMIHEFMPIARAVIGLQNLKIISFGPRPMNFLACNAPIKQLYNLGVEIEENSELDLFEAFNKHAGDERIPAIVKEMEEELGAGNKKPEILAKLAQYELTLKDWIEEHRGYRKYVTLTGKCWPAFQTQFGFVPCYVNSRLTAQGIPVSCEVDIYGTLSEFIGTVVSQDAVTLLDINNSVPSDMYNSDIKGKYNYTQKDTFMGFHCGNTASSKLSFCEMKYQKIMARTLPEEVTQGTLEGDIKPGDITFYRLQSTADNKLRAYVAQGEVLPVATRSFGSIGVFAIPEMGRFYRHVLIEKGFPHHGAVAFGHYGKALFEVFKYIGVPVEEIGYNQPAGVRYPTENPWGMKFFIDTANVEDIRKANDMGVICGVTTNPSLIAKEGRDFKEVIKEITTIVDGPISGEVKATTVDAEGMIKEGREIAAIHPNMVVKIPMTVEGLKAVKVLSAEGIKTNVTLIFTANQALLAARAGATYVSPFLGRLDDISTAGISLIEDIVTIFDNYGLETEIIAASIRHPMHVTDCALAGAHIATVPYKVIEQMTHHPLTDQGIAKFQADYKAVFGEMLEELKKEVYEANMLLPKYQLVTFTWGNVSGIDREKGLFVIKPSGVDYDKLRPEDMVVVDLNGNKVEGDYNPSSDTETHVVLYNRFPKIGGIVHTHSPWATSWAQAGRGIPCYGTTHADYLYGEVPCVRNLTEKEINEAYEKNTGVLIADEFDRPGLDYIATPAVLCKNHGPFTWGKDAHEAVHNAVVLEEVAKMAARCELINPKVQPAPQELQDKHYFRKHGANAYYGQPGKMADLKAIIESGKTALGIEFGSTRIKAVLIDESFKPIASGSYSWENQLIDGFWTYSLDDIWKGLRDCYKSLVADVKEKYGAELTRIGSIGFSAMMHGYMAFDEKGELLVPFRTWRNSTTGQAAEALTELFNYNIPQRWSISHLYQAILNGEEHVNQISYLTTLAGYIHWQLTGRKVLGIGDASGMFPINDKTHQYDETMVEKFGKLIEDKHYPWTLTGILPKILVAGESAGVLTEEGAKLLDESGKLQAGIPLCPPEGDAGTGMAATNSIGVRTGNVSAGTSVFAMVVLEDQLKAVYPEIDMVTTPVGSPVAMVHANNCTSEINAWVGLFREFAELFGMDISQNDLFEKLFKVAMEGDADCGDMMSYGYYSGENITDITEGRPLFVRKPTSRFSLANFMRLHLSSALGALKVGMDILIKKEHVAIDKIYGHGGYFTTKGVGQKLLAAAIDTPVSVMETAGEGGPWGMALLASYLTWKGEDETLQNYLEGKVFAGNAGTSEEPDAKDIEGFEKFIENYKGAIAVEKTASEVIKMLKVKNYQFWFCTGSQDLYGDECLSHVAAHSKEIVEKLNASGNLPYEVVWKPTLITNELIRKTMNEANMDDNCAGIITWMHTFSPAKSWILGLQELRKPLLHLHTQYNREIPYDTIDMDFMNENQAAHGDREYGHIFSRLHMERKVIMGYWEDKATQDRIGSWMRTAVGVLESSHIRVMRIADNMRNVAVTEGDKVEAQIKFGWEVDAYPVNEIAEAVKAVSKADIDALVEEYYSTYNILLEGRDEKEFRQHVAVQAGIEIGFERFLEEKNYQAIVTHFGDLGALQQLPGLAIQRLMAKGYGFGAEGDWKTAAMVRLMKIMTEGMKGAKGTSFMEDYTYNLVPGKEGILQSHMLEVCPTIADGPISIKEQPLSMGDREDPARLVFTAKEGKAIATSLIDLGNRFRLIINDVNCKKTEKPMPKLPVATAFWTPEPNLQTGAEAWILAGGAHHTAFSYDLTAEQMGDWANSMGIEAVYIDKDTTIRQFNNELKWNSIYYRMAKLKTTTDSNRKINGNTFLLIITIALFAIMYIAGMVIFADKGFAKPQMFLNLFISNAGLLVIAVGQTIVMITGGIDISVGSITALVCMVMANQMENHGMSAYAAIAVALVIGLAFGIVQGFLISYLEIQPFIVSLAGLFFGRGMTSMVSTEMISIKNETFLAWANAKIYLPFIGSYSKSGKFHPAYIYPTVIIALIIVAIIAVVMKYTKFGREVYAVGGNAQSALMMGLNVKRIKFKAYVLEGLLAGCGGFLFCLNSCAGFVEQAKGLEMDAISASVIGGTLLSGGVGTPFGTIFGVLIKGTITSLITTQGTLSSWWVRIVLSALLCFFIVLQAIFTRMKKKNAMNKDSIKKITSMRLFLPIVCLVAVLLVNLITTPGFFKISINNGVLYGYIVDVVNRASELVILAVGMTLVTAASGGQDISVGAVMAVAAAVCCQILSGGEVSVTELAAPMGLAIIAAILASALCGAFNGFLVAKMNIQPMVATLILYTAGRGIGQLITAGQITYVRVDSYKVFGGYIGKIPVPTPIFLAIIVVIIVNLILKKTALGLYIESVGINGTASRLVGLNSTLIKFLTYVICGVLAGIAGVIASSRIYSADVNNIGLNLEMDAILAVALGGNVLGGGKFSLMGSVIGAYTIQALTTTLYAMNVKADQLPVYKAIVVVIIVTLQSPVFQSFIAKQRAKKAAAAVEGGKMSNDVVLSMRDISKTFPGVKALQHVDFTLRKGEIHALMGENGAGKSTLIKVLTGVHSLDGGEIRIAGSDAPIINKSPQDAQSHGISTVYQEVNLCPNLSVAENLFIGREPRKFGLIDWHTMNKKATELLKSLDIDARATDKLEECSLAKQQMIAIARAVDMKCQVLILDEPTSSLDDEEVEKLFVLMRRLQKEGVGIIFVTHFLEQVYAVCDRITVLRNGTLVGEYPVKELPRVELVAKMMGKNFDDLADIKGDHKVLEKFEPVIEAEQVGRKGSIKPFDFAVNKGEVVGLTGLLGSGRSELVRAIYGADKPDTGKIKVNGKEVKINSPLDAMKQGMAYLPEDRKKDGILADLSVRENIIIALQAKRGMFHPMSRKEMEEAADKYIDMLQIKTASRETPIKSLSGGNQQKVIIGRWLLTNPDYLILDEPTRGIDIGTKTEIQKLVLDLADQGMAVTFISSEVEEMLRTCSRMGVLRDGKKVGEISGDQLTQEGVMKAIAGGDSNEMKKRFLGVLLSVAMVAAVLAGCGSSGAKETAAPAGSETEAASEAASGETEAAGNTGDVITVGFSQVGAESDWRTANSESMKSTFSTENGYNLIFDDAQQKQENQIAAIRNFIQQEVDYIVLAPVTESGWDTVLQEAKDAEIPVIIVDRMVNVSDDSLYTAWVGSNFKLEGQKACEWLKQYAAAKNMSEVNIVDIQGTIGASAQIGRTEALNEAVEANGWNLLAQQTGEFTQAKGQEVMESMLKQYDNINVVYCENDNEAFGAIEAIKAAGKTVGPDGDILVMSFDTTKQGITDTLSGDIIVNTECNPLHGPRVEQIIKQLQAGETPEKQAYVEEGIYAHGSDVASVSIDGTDYEVTEVTQDVVDARAYMFRYKKLSLNRKIMMITAAAIVPMICLVCYLLWTISYTTGAYADITNNVAKANEYVRDFKERIDYTTYLAVINNKKIDELDVGTVTVNGILTVDPYAYIDELKSVCNDLAHSATVELNRSQMVRLKNTLNTLSNCIHELENNIGRENSYDQNMATLDNDVYALTSLVQSCIRDYIYAETLNFDQIKAQLDENNRTIFCFTILASLLVVILTVGLSVRAARNITGPIRNLCMLTCKVAGGDFTAQTKDVESGDEIALLMDNFNDMTKEIGQLVEDMKRNHETLRLSETKLLQAQINPHFLYNTLDTAVWLAEAKQNDQVIRLLTYLSDFFRTSLSNGQSFITIQEEQRHIESYLKIQQFRYQDTLAYNIDIDKALYNFTIPKLLLQPLVENALVHGIRGKRGKGTISVTGRLEGDNIVFCVTDDGVGMDEEKLYNLRKASVDGSTQSANIAAFGVGNVNERIHIYYGENYGLFFKSQPDVGTTARIVIPTRNVSMVKVYLVEDEIIIRQSIKNSIDWEKEGYEFVGDASDGELALPVILKEKPDILITDIRMPFMDGLELSRMVKAELPDIKIVILSGYDDFEYAKQAIKIGVAEYLLKPVSSAVLLEHLSEIAEKVRDEREDLALKKVYYQEMQENEELIKMKFLGELISGKLSLADAMEKGKRFHMNLSGPFYRIILFKFIQEDHVQAEQSEALAEAYEAVGGYVDRFRDVFRFQRGVEGWAFLLTSVEEDMETQTKAFIEGLKAVIAPFDTLTWFGGIGSEVARIRELRYSFREADKAFAGRFVQEPNQIISVEQLNFEQQDNEFDANIFGEINQFNQIITRFLSNGSLEEVESFVGALFTEISEDHFRSLMIRQYIIMDIYATVLTFCKKLRKDAGVEGEVYGQWEGIRENEKILKLAVTTAESVDDIKDYIGTLLDHAIELRNTVSGRRYSDIIQTAKERIEQDYMSEDISLNSVAAEVCMSPSYFSSVFSKEMGKTFIEYLTEVRMEKAKQYLACSSMKTSEISYEVGYKDPHYFSYIFKKTQGCTPKEYRAARKGMRKSDSVVKQQKASSHLSGLEIVLNQMVTIDRSRTMEELNRAIQGILEYIGEYTKAGRAYTFEFIEKQSIYRNTSEWCAEGVKPQMDNLQAVPFMEMPYWHRQFLRGEKVVIEDIEAAKDEMPLEYRLLKAQDIHTVIVFPMFHTDTLWGFIGLDDPILDESQSLINLLTVVGSHLGSAYDSCHKSNLLDEKQNALQASIDAFQREQRFLQVLCQDYISVFFADLKKDYLEILKVDPEANVLQVSASEEYMTLSYKEIIESYCRQFMMQEEARKLKKRLNAERLMRELKSRDRISFRFQSLPNGAGHEYFEAQITRMGIDEENFKVLIGFRFIDDIVREDREKQRVLREALNETRINNEIISAISKIYFSIYRIDLEKDVYDEVVSINEAHKMTGVSGKASEKMVEICKAVVARDYQDRIMRFFDLSTLQERLKNTDTVTLEYMVPDGNWQLARFIAKNRNEQGVVTKVLYVTREVSDVMLRERNWFMAAEAANRENEAKTDFLSRMAHDIRTPLNAVLGFAYIAKAHIDEKSIVSENLDKLQSAGRYIQRLVDDVTDISQIESGHFHIEPAFFNVMTFFRDFQDIMGQMTADRKLHMTCRAHDILHPQIDADAIRLKQIYVNLVSNAVKYTPEGGMVHFELYEETSDSPGCVRLVSIVQDNGIGMTEDYMKKMYERFSRSVDTRINKVRGSGLGLAIVKELVDRMNGRIEVQSAVGVGTTFRVVFDFPFEEADSDMILQSPMESDLEMAGQSSTESDLTDCEGMHVLIAEDNELNYEVAHEILAMHGITSEQAENGKICVERFMEAPEGTYDAILMDMQMPVMNGLEATKMLRKMDQYHGNTIPIIAMTANVAKTDMDKCLAAGMTGHLAKPLDIHALIAALASVRKTGNAKMEKKDMFTQINNLINWLDAVVWGLPLIILILFTGCLLTIRLGVLQIRHLSKALKFMIKNEDGGEGEVSSFGALCTALSATIGTGNIVGVATAIAAGGPGALFWMVIAAFLGMATKYAEGLLAIKYRTIDNEGHVLGGPFYYIENGMGHGWRWLAKIFAFFGAGVGLFGIGTFTQVNGIASAVKNFFDPNMAHTVTLFGNTYSWATVIACLVLTLCVGLVVLGGIQRISKVAQIVVPFMAVLYVALALIILITNITAVPAAIVTIVKSAFTGSALAGGAMGTMIMAMQKGIQRGIFSNESGLGSAPIAAAAAQTKEPVRQGLVSMTGTFIDTIVICSMTGLSIVITGTWNTGLEGVAITTTAFQQGLPFPPVVASFSLMLCLVFFAFTTILGWDYYGERCLEYLLNRNQTAVKTYRWLYIICVFIGPYMTVAAVWNIADIFNALMAFPNLIALLALNGVVRNETKDYFKRHPELMKRIDFENGNIVSNILKAALPMLVAQIMSLLYNIVDRVYIARIPDVGTTALGAVGLCFPIIVIITAFSNLFGTGGAPIFSIERGKGNHAKAGLLMNTSFTLLALCAVILMIAGLLFARPILVLFGASDAGLAYAYPYLMIYLLGTFPSMAATGMNPFINAQGYATTGMISVIIGAITNLLLDPLFIFVFGLGIKGAAIATVISQTLSAAFVLYFLHYKAEYRIRFLSKTELASCGEDAKNIVSLGTAGFIMQLTNSLVTICANNVLSVTGGDVYISVMTIISSVRQMVETPIYAITEGSSPIISYNYGARRPQKVRQAGITMAVLALIYTLLIWSVILAAPRFLIGIFSSDQALMTDTVPAMKLYFAAFIFMLLQYVGQTIFKALNKKKYAIFFSILRKVIIVVPLTYILPYALNIGPNGVFMAEPVSNVIGGSLCFIVMLSTVLPELKRMMAKEKSKKKLGMTTLIFIGLFLGAFTGIILYYFVPGGYMRDTVLVDGVFYVVGQGFLRLMQMLVVPLVFCSLICGSAAIGDTKTLGKVGVKTIVFYLFTTALAISIALAVGTIVKPGLGLDTAAIQTQDVTVAESTTLTETLLNIIPTNPIGALANGTMLQVIVFALFVGIILAKLGERVEVVSNFFAQFNDIMMEMTNMVMMAAPIGVYCLIARTFSNIGFSGFIPMAKYMLCVLGALAIHCLGSYSALMAIFTRLNPYRFIRKYFPVMSFAFSTATSNATIPMAIETLDEKIGVSKKISSFTIPLGATINMDGTAIMQGVAVCFAAQAFGITLTPTDYLTVIATATLASIGTAGVPSVGLITLSMVFASVGLPVEAIAMIMGIDRILDMTRTMVNITGDAMCTVIVANQDGALNRDVFNSKMSKTKVWIIGAKGRLGSTISDALDRMAYNVLTSDMDVDITDMDSVTAFMDMSHPAVVINCAGYNTHNWLEEDMVKAFRVNAIGARNVASASRKVGAKLIHMSTDDVFDGQGNEPLNEFDTATPDTIFGKSKLAGENFVRELNPKHLIVRSSWVYAKEGSCFVNSVIRQAKEGGVIQVAAEQYSSPTSAKVLADFVMKMIDANEYGIYHASCEGCCSRVEAAEEILRCMGQDPTGRIEEISAEAGKNSPRRTDLQNLMMKVTGIYQMPDWKDAMRDYIQELRGMKRMLLTTLCYIEKGDQYLMLHRVKKEHDINKDKWIGVGGKFEDKESPEDCLFREVREETGLTLTSWKFRGIITFVTDRYETEFMHLYTADDWEGEMIECNEGNLEWLDKKEVFNLKVWEGDKIFFWLMQHDAPFFSLRLEYVGDELVSYSLNGIYHRQKAEGQSMYQEFLDTYRSMYEPTGGQIIFDGEDITKLEGAKLQPYHKRMQIIFQDPYSALDPHHNVEEIIREPMSLYTNASKSDIDEQIVELLKKVGMNMKESVLFFLLEVHFLVMLYINNMNANGEKMILDKKLYDNYVKILENELVPALGCTEPIAIAYAAAKAREILGEFPDHVEMRCSGNIIKNVKGVTVPNSDGQKGIDVAAILGIVGGDASRELEVLESVKPEDVEKTRELAAAGYCTCTLQEDVANLYIVAKVCKDSHYAEVTIINRHTYITKIVKDDAILFEAAVSEESSNYVDKSLLNVKDILEFANTVDIDDVRAVLKRQIDMNSAIADEGLMHPYGAQIGRTLLQVYGDDVKIRAKARAAAGSDARMGGCSLPVVINSGSGNQGMTVSLPVIEFAKSLFCTEEQLYRALVVSNLVAIHQKKYIGSLSAYCGAVSAACGSGAAITYLYGGSYEDISATIVNTIGNVGGIVCDGAKSSCAAKIASAVDAAILGHFLGRKHHWFQPGEGIVQKDVEGTIKSMGYIGRVGMKDTDKQILNIMIDQVKVDMIFNTSNFLLLIIVCVICYTFWAPYIRGKKTKAVVDGYVHPKEGKNCDLVWCYRLMYREQKAGKRLYCYTRKTYDTREEMRAKYPKGTEVNIKHYVQDKDSDEMGIILDDNDDRKVQWMYTLTAVLGCIGLGVGYQLLLLQMGRMRKLTDNQWEVLMHWLLTLVGGFMGTYAVLLHAGNFGSAQTGNIMEMAADLISMEWSKVLLRLIAFIIFGFGVVSAYLLTNYTKLNMRKLALWVDAAGLTLASLLPLDPVLVGLYPIFFCASFQWGVYSAAGGFNSASIFTTNNYKQALLGWTQYILTKDKEFLRKGIIYSFTVLSFFGGACLGAWSVYILNVRGAYVAFIPLVLARILIAVGESPVEDETPAELAAEATEEAEEAVLLEEELPKELPKMKFVTLVEDTTKCELGAEHGLSIYAETEKHKLLFDVGTTDLFIKNAKALGIDLSQVDTVVISHGHNDHGGGLDAFLAINDHAVIYLQEKAFNDHYTAKKTGPEYIGLNQALKTHPQVKLLDGSYVIDDELQIYSHVTGEIYETNKNLLKEDKTRDDFVHEQHLLIQGRKNVLLMGCGHKGVLNIIRQCPAAPDIVIGGFHLYSPRTGECLPEPVIMDLAANLPDAVYYTGHCTGDKALEILTRELREIHPLMTGTVIEAMLQIKNISKTYKTGNLVQRALDDVSLNLRDNEFVAILGPSGSGKTTLLNIIGGLDRYDSGDLIINGISTKKYKDRDWDSYRNHTVGFVFQSYNLIPHQTVLANVELALTISGISGKERRERAIKALEEVGLGDQIHKKPNQMSGGQMQRVSLARALVNNPDILLADEPTGALDSETSIQVMDLLKEVAKDRLVVMVTHNPELAYQYATRIVKVKDGKLLEDSDPYEIPEDEAPVPVHKNMGKSSMSFLTALSLSFNNLKTKKARTILVSFAGSIGIIGIAMILSLSHGVNKYIEDMEEKTMSEYPLQITKTTTNMMSLSADMMTPSKKPTSTDNKVKEMQILTQLVSGTEYNDLKSLKTYFESGKSDIKNQTKAIEYDFGITPQIYLQEDNGKVRQVCPDQTLTSLSGSSSMMLAMMGSSGFEQFHALPANDALYKDQYDVKAGHWPENDHECVVILTQDGQIYDMTLYSLGLKSGEELDKILEAVSDDKAVEVNEDPETYDYEDFLGVTLKLVNASDYYVYDDEFSVWKDKSDNDKYVKDLVKNGEELKVVGVVQPKEGQDITTLTAGVGYPASLLNHVIQEAAQSDIVKDQLKDKKTNVFNGKSFDDPDDEDGLNMEDLFKINEEAFKDAFKVDTSRMNMDASAFSDMDFSDVDMSDLIDANALSAAMPSFSTNDIQDIMNGVSVNLTQDTLAELFNALLKGYQDSVGDDPATDITGLTDGLKQYLTSDEAVQYLSQKLKDILQPQLEGVITEDMLKDFVGRVMEDYQEFALKQENPDDFNTNFRAYLETDAVSRILSEELAGIKDKLSGVTITDDQIKEILTDLANGYGEYAKANNLAQPDKIQAAFLKYISSDAGQKLLLQYAEKIVDTKTLQANLQNKMASVMGGFTNELTSQISSAMGKVMEQVGTNLQKSMGNAMTSLMGNMQDIFSIDPDAFAKAIQVNMSEDDLQELMTSLMTTGTVSYESNLNKMGYADENDPQTISIYPIDFDSKQVVDQIIEDYNDDMKNSGQEDKVISYTDMVGMMMSSVTSIVNMISYVLIAFVAISLVVSSIMIGVITYISVLERRKEIGILRAIGASKGNVGAVFNAETFIIGLLAGLIGIGLTIIAIFPMNYIIHTVSGNTDVNAALPIGAAFILIALSVVLTLLGGLIPANKASKSDPVTALRTEMTKEDLGHLIIASTDSLYRISKSILRNETDCEDAVSEAIVKSFDKINTLQHASYAKTWLVRILINECYRIYRQKQFAPSNDFTFKENLSDEADYSELYHAMMQLDDKYRIPVELYYIEGYKIHEITDILNRSEGTIKSQLARGRQQLRKYLESEAAQMNNNDYLKTPEHFKMLVESKVNEQLNTPISDKKKPTTSIQAKKEKSGYHFKKIAAAAAVIAIITTTSVFAAKHFRLSDYFESSTETYNESYMENIDNRDISVKNGFPEQMKQFEQNTNKVFDEPLFTLTETYYDGNYLYIYAQATDAGQEYDAITSRIFINGTQYIGDFGRLLGQTETNGFNQDEYVGTFALDGLESDNFTVEMPLSIYLASEETSVTETSAVVENDSADNTVTPALIRQGQQTVSFKVTAADRVLGYTDQQVTVNSDVTADISDLKRTELGIRLNLTWHLDASAAERYLYDFEYTDEENDNLSGYAKPDYQVTDDKGTNYGNDQIHINQVQATSEDVDPVSVIRNEDGSADCISKIFISDVPEDAKQLTLQLKHNGQTIDEMTVEISLKMNTELMNTIAAANDKAQYDACAKRLIGQKMILAHILVRTVDEFKGMQPEEAVAYIEGEPLIGIVPVNPGMTNTGRIKERTILTESIKGLNTEDSEINEGTIRFDIIFYVRMKDGLAQMIINIEIQKDQPADYHLLNRSIYYVSRMISSQKGRDFVKSKYNDLKRVFNIWICLDMNENSLSRYYLANENILGECHWKGKQDLINIIFIGLTKDLPERDKKYELHRLLNALLSDKIKVQEKIEVIENEYHILMNDDLRRDVNIMCNLGEGIEERAIKETTERVTKKVTEEVTREVTEEMTEQFIRSMYDKGCSIELIADVARKSIAEVKAILDKAILSVMSEKNSWGKDFPETPESFRMALKEMVEKEIADDEIEVKVNDGTNHVKGKINKRNTKYMQDRRSSANVSNRRWRVVKIAVAALVLAGILGGGVYAVTKSGASSLVGREVDETGAEAYLTTDASAFNQTVTPGWPQIMVDIRGEDNAAEVKGVSEPLLDITQVYYDGLSLAFYARPTGKGKRHQLNSDRLAIGDAVYMIHFDKLSDEEVKENEGSGVKKGDYKGTVQLGGRDVPDSFTASLIVDADSLGTQTISFDAKLDENAIIKPAQTVITEDGVVATVDALKIAESGTYIHVIWEFDESQKELYDKMSSEGGGNQVVFMALDDNNGNHFTTEDNMDTRQTIVFTVDGDDWSGAEQRKSYEADGKYYREMFGIIEGMNQDVTSLTVTPYVRTGVEDGEEHTYTNLDFAAFTVEYDEMNKKELGALIIDGTDDFYRVAKSILKEDADCQDAVQEAVSKAFAKIDTLREKKYAKTWFIRILLNECYRMLRQRKREAAYHEQISGEEIRQHQYSDLYQKIMSLEIEYRVPLVLYYLNQYTIKEIGQMMDLGDSAVKMRLSRARKMMRRMYEQEDAVMKMQESPEDYLETIYMLSLHSSEVRSIDVARHLGYSKPSVSVAMKRLRENGYVNMDDNNLLTLTESGLAIARSIYERHQVISGYLMSIGVSEETALKDACRIEHVLSEETFHKIKEIFYQSRKMSKKYVVMDGNTAAAYTAYAFTEVAAIYPITPSSPMAEKVDEWSAKGKKNLFGTTVDITQMQSEAGAAGACHGSLQAGALTTTFTSSQGLMLMIPAMYAMGGQFLPSVMHIASRVVTSNHHSIFGDHTDFMTCRTTGYAMLMSSSPQEAMDLAAVAHLSAIKAGYAFMHCFDGFRTSHEMQRIEALDYEDLRPLMDTEALDAFRHKSLNPEHPTNRGNNVNPDIYFQCKEGANVKAAVVPETVQHYMDEINKITGRDYKLFNYYGAEDAEEVIVVMCSASEAVKETVDFLNANGRKVGLVQIHLYRPFSVEHFAAAIPASCKKIAVLDRSKETGSVGEPVYLDVVTALNQAGRKDITVVGGRYGLSSKDVTPGQFIAVYDNLRQDNPKNNFTIGINDDVTYTSLEYKEIEIPHPGQISCKLWGLGGDGTVGANKNAISTIGLVGNKYAQAYFSYDTMKSGGLTQSHLRFGDEPIRSTYLVNSADFVAVHAPTYIGKYDVTEDLKEGGTFLLNCPWTEDELETRLTGKIKRDLAKKHINFYIIDAAKIAAEIGLGKRTNNVLQGAFFALTKVIPMDVAEEDMKRNNYNSYFKKAGQKIVDLNNKAVDLGISAAVKINIPAEWATAEDTPAAMPKNATPFVRDIVVPMDRQMGDKLPVSVFQKYGVLDGTWENGTSAYSKRGVATKVPQWNPNSCIQCNRCSMACPHAAIRPVLLSEEEKAAVPASFVTAPAKGLGNQKNYFFRMQVSPYDCLGCGVCQTVCPVNQNEKMDDALVMSPFEEQKSEQDNFDNIAMNEAYLKKEVINDKTIKNVQFAKPYFQFSAACAGCAETTYIKLISQLFGDHMYVGNAAGCSSAVSGGAPILPYCKDCKGHGPAWEHSLFEDNAEFAYGFYLAQDAIRKELLIRLENLKNAGSEPAVIGEYMEHWNDSEKSREVTDNLVKALEQLPVNEDIQYILTNKEYLAKKSVWAVGGDGWAYDIGFGGIDHVMAQNRNVNLLVLDTEVYSNTGGQSSKATPISATAKFAAGGKTVAKKDLGGILMQYKYVYVAQVAMGADPNQTLKALREAESYDGPSIVICYCPCLEQHIKAGMGCSQEEMKKAVECGYWHLYRYDPRRAAEGKNPFQLDSPEPDTDKILDFMMGENRYASLKNNFPEKADALYQKEIEDVKARYQKYKELAKMNFYGYRRPDGRVGVRNMVLILPASVCASDTARIISSQVVGSVTFNNQLGCSQVASDQQYTMDVMAGYAANPNVYGTVVVSLGCENCQMDLVVKAIEERTNKPLKQVIIQEAGGTIKAAEIAVRYAKEMVEEASLLQKEEFPMSELIIGTECGGSDPTSGLAANVLIGELSDRIVAEGGTSILSETTEFIGAEHILASRAATPEVRDRIFEIVHRYEKALQLVGEEVREGNPSPGNKAGGITTLEEKSLGCIHKGGHTPVMEVYDYAKQVEAKKGLVIMDTPGNDPSSVAGMVAGGAQIVVFSTGRGTPTGNPIAPVIKITGNKLTYANMSDNIDVDASPIIYGGELKKLGDDFLKLTAEVASGRQTKAESLGFTEMAIARVCNFVMQNAMIIDSRDNVIVAIEPIAKGDTVTWMCDGKENTLTALQDITIYHKIACRDIVKGMPVIKYGEHIGIAVADIKAGEHVHIHNVEGHRENLEAKVKMTSPGLLILALVVAIAVILFCIIVLKLNAAIGMVIACLVMGVMGGLDLLTTTSTIASGFGNMMTSIGLPVGFGTILGQLMNDSGAAEVIADKIVSAFPAKKAIWGLSIAGFILSIPVFFDVTFIILIPIGITIASKIDLKMGYVTGCLTIGATTAHCVVPPTPNPLAAADIFGFDLGIMLIVGLIVGFITVMVSNFIYIKIHDQGIWNEEKDVNHSSNVTEELVAAREGRKSQEDRTKKPSLLISLLPIIIPVVCILFGTIGGALFAEKPVICSFLGDKVIAMLLGTLGAYLVSLPYLGKNGIEKSAGEALKSAGVVLLITGAGGSFASVITATGIGDAIVGLLGTNTTSILPAMFLAYGIGLVFRVAQGSGTVAGMTSMGIMATIAPAIGCHPVWIALACLSGGNSIGHVNDSGFWVATNMSGLTVTGGLKTYTLGSFISSVCIFVLAIIGALIIPLMETITDLIKGVSVPRMVKIREVFDDTHIPVNMIADMVNAELSREALGGQVKPGMRIAITCGSRGMSNNAVMAKAIVDFVKSKDAEPYIVPAMGSHGGATAEGQLQILKDYGITEEAMGCPIKSSMDTVQIGLSGVRHQPVFMDKNASEADGIILFNRIKPHTSFRGPYESGLMKMMAIGLGKQKGAESIHHQSPAIMHELIEEYGRTFIDNVPIIGGIAVIENAYDETYLIKGLTPQEIITEEPKLKELSYKTIAHILFDKCDVLVVDKIGKNISGDGMDPNISGRFVLPQYCSGGIQAEKCVILDITDETHGNAQGVGLAEVTTRRLVNRMKLEMTYPTGVTNTFLHLMKIPMIMDNDREALQLALCCCPEAEDQNNMKMIRIPDTAHIEYIEISEGLLPLAKENPNIEILTEPYDLPFDENGNLFMGQEQHRATARVLDIVESLSEVQEGLTLTELAVALKAPKSSLFPIVHTLEQRKYIMCDAGSGKYRLGLRTYIIGASCTSQSGFEPLINIMNSVTESTQETSQFGILEGGNVLYVAKKDSPQAIRMISWVGTKLPANATAIGKALLSDLTDEQIRDLYRDGLPKLTEHTISDMDLLLGQIEQIRCGEIATETEESTPQMRCFAVPIRQNGRVDAALSISVPIFRYTDEKRVQICQCLREAQQQIEQLVGLYNFELIKPMSVVIIGGHDRMVCQYKKICKSHKCKAKVFTQMSADLDKQIGDPDLCILFTNTVSHKMVRCAVDEAEKKKFKIVRCHTSSGSALEGILLEHAVMKEIMIAYWSGTGNTAAMAAILGKGIQDGGATAKVVSVEDIKADDLKDYPVFALGCPSMGNETLEETYMEDFVTEVESFASGKKIGLFGSYGWGDGEWMRNWVARMEEAGAQVYGGEDAICMNEPDSEAEEKLEALGKELAALMVAYRQTYEIIRGIQEKAAEQCAPVIFGIKPSNLLIIEQSYAKALKSLVETTGLKVRCFEHREERQVWFMFREEPLYRQLMDPDNRAFMKQFGYTEDMTMDEMLVYAAKRFREYKAGKADFPHEMGIFLGYPLGDVKGFIEHHGRNCLCSGYWKVYENEEKACETFRLYARVKQIAMDMVRQGMGFGMAEQYQFVMNTPPDFSKYTKQLNIEQLKKQGTQALADELSYTRQLYESLDTIFQDSLDGFFITDGEGNVLKVNKSYEEMSGITSEEIIGQNMHDLESTLINYSASLIVMKTGKTATIEQSFLRTGRKAYITSTPVFSPEGKIIMVISNTRDFKMIEELRQQLSEQMVQVSEYKEKIRALTQQNIDRSQFLVNDPKMYEILYSATKVADKDTTVLIQGETGTGKELLAHFIHQNSSRRDNPMLSVNCGAIAKDLIESELFGYEGGAFTGALSKGRPGYFEVANGGTLFLDEIGEMPMNVQMKLLRALQENEIMRLGSSQPRKIDVRVIAATNRDLKEMIDANEFRSDLYYRLNVVNLEIPPLRERKKDIIPLAQHFLNQFNAKFKTHKTLSPYSCKTLEEYNWPGNVRELKNTIEKMVILSDEDIISSAELWSSESSLIKDNVQLGNIQLKTILEQIELKYIREYCSLYGTLEKTAEKLDMNLKTLSRRKKHLEEKYPRSENLMPLMTGDEYVRSLQKIKMKIFLFGEEIDNPVGNPILQPAVNSVKATYDLAQNPEYADLMTATSNLTGEKINRFTHIHQSSDDLVKKVKMQRLLGQKTAACFQRCVGMDSFNSVYSTTYEVDKKYGTHYHDNFVKFATYVQQNDLTVDGAMTDTKGDRSLSPSKQADPDLFLHVVERRPDGIVVRGAKAHQTGILNSHEVIVMPTIAMGPDDKDYAVSFAVPLDTEGLMMIVGRQSCDTRKTEGCQLDLGNSTYGGMEALTVFDNVFVPNDRIFLNGETEFAGMLVERFAGYHRQSYGGCKVGVGDVLIGATALASEYNGVEKASHIKDKLIEMIHLNETLYCCGIACSAEGQPTESGNYLIDLMLANVCKQNVTRFPYEIARLAQDIAGGLMVTLPSEKDMDHPVVGPVIRKYLAGPAKVDVMDRFKIMRLIENLTLGTAAVGYLTESMHGAGSPQAQRIMISRQSNMPAKKAMAKHIAHIKDMNTLNKIQQVVSDRIRPALQGHGGDMTITSFSNGILKFKFTGMCSNCPSAWITTEELVKNEILSNVPEVKDVQMEFAVSDELIDMAKKLLNHETMIAVIVEVDAVAAAAVANRDTEQYHRVSREKEEILYLLRKRGFRVTKQRELILDIVFEHECASCKEIYYQAIQRDPGIGMATVYRMVNTLTDIGVLKVATLKPQTALGSGSGCQILLKNQNKIVLNQTEWTEVLQNVLRRKGYNYNAADEIVEVTIQMAIRIALAGNPNCGKTTLFNALTGSNQFVGNWPGVTVEKKEGKLKGHKDVIITDLPGIYSLSPYTLEEVVARNYILNEKPDAILNIVDGTNLERNLYLTTQLMELGIPVIMAINMMDLVQKNGDNINIQKLSEVCGCPVYEISALKNTGIKEASDAVVKAAQSKAVQGTVHKFNNKVEGYLNDIETLLGSDVADAQKRFYAIKLFERDDKIAAQMKSAPNVEAIISKAEKEMDDDSESIITNERYEYIASIIGSCLKKKHAGADTISDKIDRIVTNRILALPIFAVIMFLVYYISMTTIGAAATDWTNDNLFGDGFFIGSDGGYGDADEAYAGALEVVNGFISYEADQGMDTSAVEAAIDSEADDYDPAAAAAAVNAFVAQVDPSTEATYLVEDEETLATEETTASYADLTDAVAALSEAGYEAPDPAAYGTFISSIPDAVSGLLENANCAEWLQGLIVDGIIAGVGAVLGFVPQMLVLFFLLAILESCGYMARIAFIMDRIFRKFGLSGKSFIPILVGTGCGIPGIMASRTIENERDRRMTIMTTTFIPCGAKTPFIAMIAGAVFGGAAWVATSAYFLGMAAIICSGIILKKTKIFAGDPAPFVMELPAYHIPTPGAVLRATWERGWSFIKKAGTIITLSTILVWFLSYFGWVDGAFTMLAEDQLDSSILARVGHAIAWIFAPLGFGNWQATVASVTGLVAKENIVGTLGILYGGGDGTVYQTMAASFTLVSGYAFMAFNLLCAPCFAAMGAIKREMNNAKWFWIAIGYQCGFAYLVALVINQIGNLVANHTFGIFTVVAILVIIGFFYLLFRPYKESNTLEVKGKAVAMTLRNVGVGQTVTVSKITGVGAIKRRIMDMGLTKGTSVYVRKVAPLGDPIEVTVRGYELSLRKADAELIEVQMPLALLGVGESGTITDIRGKEDVIHHLHNLGFAAGTDVEVVGNTDAGMIIAVKGSRVALNRGMASKITVNRMPSIIFHLTEAKLITQHLREASADYPFTHIHGWQNDFTIGSILPDAIPRPLKYKTHFWHPSDFTHVVIAPDLNLWQKTYPNTLKEPMLIGYLAHLHLDYLYFTEYLPSIVRFLNEQGLDETESLKAVSVQIRQTGEQMPVMTFFSKDYFYGDYIRMSPHLIEKYHLSMPASPIHPWPVNETDFASYRQFCELAAADLSLDIKKEPVRIFDPTDFENFVNKAAETFIQQFIRMAKRDYYEVLGIDKKADDKAIKRAYRKLAKKYHPDTNPGDKQAEQKFKEVTEAYNVLGDEKKRKLYDQYGFAAFEEGAAGGAYGGAGSGFGGFQGGFGGNGGYQEFHFKGGQNGNMDDIFGDIFGDMFHGRSSSGFGGQGFKQSYGSGFGGGSFKSKGQDLHAEIRVSFEDAAFGCEKVINLSSGQGTPAQSLKVRVPAGIEDGKSIRLRGKGGPGMNGGEAGDLLLKIHVDEKPGYERKGMDVYTTISVPFTTAVFGGEAIVNTLKGSVKCKIPAGIQSGSKIRLRGKGIVSMKDPSVHGDMYAAVQIHVPRNLSPEAKQKLREFEKIVAAMKIKTSGRDDSRSDQYRYPYEPTPYSVLERLAGSGYIRKSNCLLDYGCGKGRVDFFLSYQTRCRSVGVEYDSRIYETVCENKRHAASGSRTEFVMGNAENYVVPAEVDRVFFFNPFSVEILRKVLAKIEDSYYENPREIQLFFYYPSDEYISELMTVDMLSFVDEIDCRDLFDGENPRERIMVFAYMENYGRCKNCEYGEPSGCSWKWSCTWYHTLEDPDKLKDCNRYKECDMVREITKDIFFLGQKSEPATEADIQIGRDLQDTLKSHRAECVGMAANMIGIKKNVIIVNMGIVDLVMFNPVLLKKSGPYETEEGCLSLTGVRKTTRYREIEVEYRDMSWTVRRQKLSGWTAQICQHEMDHLKGIIIMIINFLIIIQGKTLKVLVYRKCSTCLKALKWLEVNQVVFDERPIKEEHPSYEELKAWYEMSGLPLKKFFNTSGILYKQMNLKDKLKEMSEDEQLKLLATDGMLVKRPLVIGDDFVLTGFKEKEWEDKINGMGKVRLNEDREIVARVKEGLKRKEGYCPCRLEIKPEYKCICDEFKAQIQDPDFEGYCHCQLYYKEKQSFQNAVMEGVLYGCEQGLYGWKVTDCKICFEYGLYYSPVSTPADFRLLSPIVLEQALKKAGTELLEPYLHFEIYAPQEYLSRAYHDAPRYCADIVSTQIKNDEVILKGEIPARCIQEYRNDLTYFTNGQGVCLTELKGYQPAIEYSEKRRRFVYVRIYSGTLHLRDVIRISEKEKIKITEMCVPSNGEIVPADHACPGEIVILADDTLKLNDILGNEKLLPHKTWIDNPMPLLRTTVEPQKPEQREALLNALAEIADTDPLLHFDIDTVTHEIMLSFLGNVQMEVICAILEEKYHVEAEIKEPTVIYMERPLRKAEYTIHIEVPPNPFWASVGLSIEPLPIGSGVQYESRVSLGYLNQSFQNAVMEGVLYGCEQGLYGWKVTDMQMEVICAILEEKYHVEAEIKEPTVIYMERPLRKAEYTIHIEVPPNPFWASVGLSIEPLPIGQPEKGIIDWTMYLEKTKKKPTMKQIWCESQREPENYPVDKELFLHYMDLWGVEIEGYHKEEGMEKNALGAMENHKKGIVLIIKPIKKALLYEAGIIEFAMILFYINASTLKEILIEFGISLVVIFLVILHTGETVILDEKGCCLVWFNGLLKKKYKWEQLKTKRILYKADCREVLGYEAKKCVLLTKRKINNKSVWNNPFVQTEKYTTVEKGAEFVEQFPFLFRPLSIIYIYFAAEPEDCKEDGCYYSVVDEKAFMEKMKEWHVELEDNKPEEIPPWKEQIMVDFGEATVVGGIAGKIGGSGVNGRKLRGIYRRANDGIKTVKSARRIAKYVAKKTAIKVTVKSGVKQTVKAGFFSNITNFVRKLFTKSRVMKKYYDYYVNRRNTPHLDLYTKLIGMFYFWNGMNFILGSAYALSIGQKKLAVSGLVLGILMCSLIKDKTTDKRKNQRDLKAVIGDGIIYAICALGISYVLSFWLLLLVYILEMIYVAWVIFIYFKQQNGQRSRKQRRKKEYMYRKDVCIGEKLAAGECEDAKGEILKEHLLLRVKGMHILWNMMEYVVETEKEIVQNYIIKSKQERIEWELSHSKKRKDIIWHFHKPDIFKEASLHAVDYMDKEAMKNYLHKLSGAENVYFIGEDYIGKMLLEQAAERANEGEICIIYCGNGIGYYQGEQEKGAPPRFMLLEEKCCKIPSKIMLKREISERLYSWKNENKKKALCVIGARQIGKTTIIREFARKEYEYFVEVNFILDKGAGQIFDGKLDADTIIENLTAFKMQKLEPGKTLIFLDEIQECPNARCAIKFLVEDGRFDYIESDSLLGVKYKEVPSYAVGFEEIVYMYPMNFREFLGANGVQETTFAALQSCYEKHEKVPQVMHETLLKLFAAYIVVGGMPDVVQTYVNTHDIGKVIQVQRNILELYRQDIAKYAEGSDKKKIKAIFDSIASQLDDKNRRFVLNHIDENGRMNRYESKNNRKNLRLFFGVFERVIVCAYFYICILLRTSSLNRLRSRIVTSVTSMIIAQVRTMADQERAIGTAMKTINKSENHSEKKQHKTWYKLDLSANVYPTLQRRNFSNVFRLSVVLKEEIDPDTLQRAVDLTLPRFPSFKVALHKGIFWRYLEPNDHPGPFVRPDIINPCMPMLFKSNNRYLIRIYYYRCRISLEVFHSLSDGSGALKLLKTITAVYLRLKGHEISNTCGVLDINEPPRPEEMEDAYIKYASSRVKRPRSQGKAYRIRGHREPFYTLNIIHGLLSVQEVLQKARSYHVTLTEYLNAVLLYALLEKQKADHVFREHPVALALPVNLRNIFPSDTLRNFIAMVYPSVDPRMGDYTFEEIVTHVHNYMRFYINDKFLNADITTNASTQQSPLIRIVPLFVKDIVVKQFYIRVQDKQSTAGLTNLGVIDVPEEMREFVDYFDVLMGQPFSLRTNCAVGSFGDTLSINFTSTIIETDVERFFFRKLVQEGLHVKIETNRDMNRSEFMAISEKSNQGLMKAIKRMHTLVESDDLERVRASQENISALLKHRELNYEPFQVGEIPSEWVSVKRSHMRKFVIFYCHGGGYNTGSFHYARSITNKLSSTTSMDVLSFDYRLAPEHPYPSATEDAMAVWDYLMHLGYGARDVIVAGDSAGGNLALSLVLKLKEQKRILPRGLILFSPWTDLTGSGKSYETKVDVDPILNREYLDNAIAAYASGQDLKNPLISPLFGNFTGFPPTYIQVGSNELLLSDSLLLKKNLEKYHVPVRLEEYKGMWHVFQMSPFKTAYDAMDQVAEFIFDICRMNTNSRNLTLLTDLYELTMMQGYFKTHSKEHVVFDVFYRQNPCGGAYAIACGLDQAIDYIKDLHFEQEDIDYLRSTGFFQEDFLDYLKNFRFTGDIYAIPEGTIIFPKEPLVKVIAPIMEAQLVETALLNIINHQSLIATKAARVVQEAGGGVMEFGLRRAQGPDAGIYGARAAVIAGCIGTSNVLAGQMFDIPVKGTHAHSWIMSFPSELEAFRTYAELFPDNCLLLVDTYDTLNSGVKHAIQVFREMREKGIHSKLFGIRLDSGDLAYLTKKARIMLDEAGFPDAIISASSDLDEYLINSLMNQGAKITSWGVGTNLITSKDCPSFGGVYKLACIIGENGTEIPKIKVSENVEKVTNPGNKKILRIYDKASGKIKADLITLEDEVFTEDQPLTLFDPLATWKRTRLEAGTYTIRELLVPIFKNGQCVYESPSVMDIQAYCTQEKATLWDESKRLINPQEVYVDLSRKLYDLKNRLLDDAHTIKDMQSHEAYLKRAIELSVKSRESGNTPFAALLVDKDGNIIMEQMNNEITEHKCTGHAETQLVERASHAYSKEFLWDCTLYTTAEPCAMCSGAIYWGNIGHVVYAMTEKDLLSLTGADPQNPTFDLPCRDVFAKGQKAIEVTGPFPELAPAAAKVHEGYWNKMLFGTGPYGCQYRTFCQADSNSCQTIRKGQGESTGRNGMIGSYLDEWNIVTITVRLILAVVCGGAIGLTRSVKRRGAGFKTHALVCLGSALVMMTGQYIYVDFGAISDIARLAAQVISGVGFLGVGTIMVTRDNHVKGLTTAAGLWTCAGIGLSIGIGFYSGAAITTILVLVIYRFMGRVDEIAYEHSRVLDIYIEFESRRSIAPFISVLKQNNYKIVQMELNKSKKNKEELVNATLVLEVPEKTKHGIVIDLLREIPGIEYVEEIMKRSKKLMGLTAVIMGVVMATAACGSSGGAAETKAADSAASTEAATEAAGGDTSAAGDLNSKTVDELTEAAKAEGEVVSVGMPDEWADWASLWKTMSDTYGISHNDTDMSSSEELQMFATEGEKGTKDIGDVGYGFAGQAVSEDLVQGYKTSYWDSVPDWAKGEDGKWMVAYTGVTTFLVNTDQVDKVPTSWQDIKDGDYKVALGPLTGGNAQAAFIASAYAFGGDMNNLDPAFEFWTELAKEGRINTLDITQANFESGEISVGVVWSFTGIPYSKNISQYKMQAVVPSDGCLQNGYASVINKYAPHPNAAALTRETMFSDEGQTYLALAGAIPTREDFTIADEYKDQVISKDDIANAVLISDADAYSAACETAKTRWEEEVAPLLVQMHPMNQKNSIRQGLNLMKKKTYIYLLALVPFLIVAMLYEIVPLITVIVKSFQPDGGTGFTLENYQSVFSKLLYQKAIINSIKISLTSAVAGIIIAFLGARAAHQHQGKLNHVFMTVLNMVSNFAGIPLAFAYMILLGNAGLVVNIGKELGINALSTYNLYTMNGMSLIYIYFQIPLSTLLLIPAFDGVQKQWKEACTLLGGTPGIFWRKVGIPVLMPSILGTFSVLFANALAAYATIYALMMDNIALLPVQIAGCFTGEVKIRAGLGGALSVVMMAIMVIMILITNGLSRRFQKGGNRKMKKKSAGSVAIMLLVMIYLLIPLVISIIYSVFHKWTGVIPEGFTLHNYVDLFTDSNFLASVGRSIAMSIIPIIVTIVIVLLALFVTAIYFPKLEKYVQIICMIPYTIQGVILSVSILSLYVGSSSILSNRLVMLMGAYCIVILPYIYQGIRNGMRAVNMPTLIEAAEMLGASKIYAFFRVVVPNILSAIIVSSLLAVGIIFGDYVLIRNLAGTSAPNMQIFLYQTMKSDSTKASAVFVVIMFVTFVITAIVLFMKSREAKGKTHRKMSYIRFENIVKSFGSNTVLKDINLEVEKGQLVTLLGPSGCGKSTLLRCLSGLETVTSGKVYLDDKDITDVNPKDRDIGMVFQQYSLFPNMDVAQNVAFGLKMKKVPNAEIDKRVKEMVDIVGLSDHLHHYPSELSGGQQQRAALARAMVTNPKVLLLDEPLSAIDALLRHSLQVEIRRIQQELNMTAIFVTHDQDEAMVMSDVIHLMYNGKIEQSATPTEMYTEPVSKFAATFIGHYNMVPVDAFKKMTGVDGEGTDVAFRPEVIDISTKPVEREGCATIKGHVVVSLPHGNVLRYAVMCGDHQIDVDVLFKKATIIPNGTDVYLTLKQDDCIFLMEEKNAAIQLHRQRVGEEEQRDRRPIGAACFAALFMLDCGECFHGSCIYVSVSNLSRRMTKNFAHRGFSGKYPENTLLAFSKAIEEGVDGIENDVHLTKDGVLVVMHDELVDRTTNGKGYIKDKTYEELAQLDASYIFKEYGPQKVPTLREYLELVKDTDIITNIELKTGVFEYTGIEQKVYDMLREFDMVDRIIISSFNHYSVLRMKAIDPAIKCGMLEESWLINAGAYVASTGVECFHPFFKNMTPENVAEVKSHGLEINTWTVNEEEDIREMFRVGVDSVIGNYPDLVNKIRNNGMADKTAILSVGIDVGTSTTQVVFSKLQMDNAGGYFSVPRVAIVDKEVVYKSEVYMTPLKTDVLIDTDALRNIVAAEFRKAGYRPEDTDSGAVIITGESARKENSDAVLKSLSDFAGDFVVSAAGPDMESLIAGKGSGAWQYSMDHHCRVANLDIGGGTTNVVLFEDGETLARGCLDIGGRLICMNPQGIITKVSPAAAVMAQAAGVSVSVGDRCDELKLTAVTRQMAAALNAYLGVGTKDIDAILRQIKTPGSSDFPVPEKVQAVFFSGGVADLIYHESADTWAYGDIGVLLGRAIRESRLFTDFQKMEPGETIRATVVGAGTYTTTISGSTITYSDDIFPLKNIPVIKLDEELQEACFAGETEPVIRRIQWVLGQNDEEHFILAMPGKRNPGYMEMKRAAASIRQIMDRVQPPGEPILLVIESDIAKAMGQMIRQQPDLKRQVVAIDSIHVEDGEYVDMGKPMMNGMVIPVVVKTLIFGMKLATVLSGQAFIFRSLKEVLAKANELKSGDVLAGVAASSDLERIAAKEVLSQLLLSDLRNHPVVPYEEDEVTRINQDGIDETVYQRIKNWTVAELREYILSHETTEDDIHLLSKGLTSEMVAAVCKLMTNMDLVYGASKVRVPAHCNTTIGLRGTLATRLQPNHSTDNVEGITASLFEGLSYGCGDALIGLNPVNDTVSSLSEVLKRFDEVKNRFEIPTQICVLGHITTQIEAVKNGAPADMIFQSIAGSEKGNRAFGFSAETVEEAMALLKEKGTGEGPDVMYFETGQGSELSSDAHYGADQVTMEARCYGFARAYHPFMVNTVVGFIGPEYLYDSRQVIRAGLEDHFMGKLTGIPMGCDCCYTNHMQADQNDIENLSMLLASAGVNYILGVPTSDDVMLNYQTNAYHDVSTIREILGLRPIKEFDQWLEKMGISENGKLTKYAGDPTLFTKRGGGIMNIDEALIERIIREVVSQVVAEKAAGGGQNRSASGNNQNSMQSVNLGQIEQLVKNVASGDRQTSSGGQTSNAGGYHPEEPVHDVDIEEDITSREVKKRPLIDQPQDPEALERMMRLTTARIGVGCAGPRLKTQTLLTLRADHARARDAVMLDVHQDVIDNLKLFSVQTRCQDKNEFLTRPDLGRRLSEDGVQKVKDQCIEGPDVQLIVADGLSSTAINANIENVLPVLMDGLSAAGLRVGTPFFVRYGRVAVEDEIAELVGAKVVCIFVGERPGLGTAESMSAYLAYNAKIGMPEARRTVVSNIHKDGITAVEAGAYLTDLIQKILDKKASGVELQNMKNDPIRTKVLSIRLIPNADRFLLKAMQVQEGHRSLGLITTDCDDVSYAALDEATKKADVSVAYARSMYAGSSNASTALAGEFIGILSGENSEDVKSGLAAAVSYIENDACFYSANNDDSIVYFAQCISRTGSYLSEMAGVPEGTAMAYLIAPPLEAVTGLDAALKAADVEMNLFYGPPTETNFAGGLLTGDQAACRAACEAFRETICRIAEHPVENIDMDFDKDLQSIQEVRWLVAKAVVAQKELAKMSQQQVDGIAKAIADACAAQSERLAKMAVEETGFGIWQDKVLKNLLGSAITWDSVKDMKTVGIIKDDRQNGLMEVGVPMGVVAALIPSTNPTSTTMYKSIISIKAGNAIVISPHPNAKNCIIETAKVICEAARKAGAPEGIVQCITLPTMEATDALLKNRNIGIILATGGEAMVRAAYSSGNPALGVGPGNGPAFIEKSANIPVAVKRIMDSKTFDNGTICASEQSIITERCIEQKVVDEVSRQGGYFMTPEESEKLSKFILRANGTMNPKIVGKSAQTLADMAGIRIPAGTRVLVSRQRTVGKDNPYSREKLCPILAFYVEDGWEEACRRSIEILNNEGAGHTMTIHSEDADVIREFALQKPVSRLLVNTPGALGGVGATTGLQPALTLGCGSVGGSATSDNVSPLNLINRRRVAWGLCELEDLRKQQEQMTGVSAAPQSTFGSGSHAGGSCGQSSVFGSGSNAGAACGNSNNGAACGSPEITEDDIARITKAVLQKLGALNMADRLLALGMIETKGLVGSIEAADAMVKAANVNLIGKVHVGGGLVTVMVRGDVGAVKAATDAGAAAASRVGELVSVHVIPRPHEEIEYILPTLTTSDRMEILTDIALRAHWFRSHEKAYHVSKDTMLTPAARDFIREHGITLIYEDSALEGQPEVEVSSVPESVKAVNQLPDAAESVGEPYKAMPMAAVPQGADHKPQYVNGETGEVLSVKPENMTHLHGNVLVPKTHPQIAFRGMLDSLEAKIMSLQVVASENGLHRLTDALDEVLAYVRRILSAEVLDKELGEIHLLGLDSAGLRYESHHIKEIYGIPHPMPEYRMGRICIGLNELRTFVRETELAAARAFQSGDTCTRPDIVEAMNRLSSVIYILFCRQLTGRWPGQQEPSEMKDLPGFLVEASGRHVHLTQQAIDVLFGENLHEKSPLSQPGQYASEERVRLVTAKGEIDNVVVLGPPRGAVQVEMSLTDARILGITIPVNLSGDLKGAADVILVGPKGIYNAVGSVIASKAHIHMTPEDARLYGVEDGDSVAVRLETERPVTIDDVIIRVSEKFSLAMHMDYDEANACSYKKGDMGYIIKKNMDEKLMKQIVEAVMQELMAQRSNASACTEGLDKLLVIGDLQAVPADMAEKYQIFLIDDYIQNKNIHRYQKILITSLTLVQMSDIAQGRDGSPEACAVIRGLLNGLDVCMAEAAFPHRKYAGKSSSRLYEVIENNARMLQSFGIKLLKECKVGVPPIPAKPPKYQAPPIEVPRGTGHTTTDRLITEDVARSLIDGGNTAICLAANAIVTPSAWDLFRQKGIEVIRKMLICKVVGHVWATKKEEGLEGLKLMVVQEIDGTGRKKGNTFVAADVVGAGIGEQVLTVSGSTARKAFGRDTVPVDAAIVAIIDTVEVNREAARGSEMDLIKQIFDSGVVGCGGAGFPTHVKLKASPEILIINGAECEPLLRTDRYLMIHEAEKLVSGVDLICHELSIPEGRIALKKTYTKEIEALTAAIEKLHSKVQLHLMDSFYPAGDEQVVVYEVTGKVVPPAGIPLDVGAIVDNVATIIAVADAVSGIPFTEKYLTVTGEVREPSVLKVPVGTSFAQCIEMAGGTTSDKVMVVSGGPMMGAPMSWEAAMNASVTKTTSGILVLPEDGAIDRRRKTQLNHMLNRAKAACIQCTFCTQLCPRHMLGHPLQPHRIMRKMAMNMPHQDNNETTKDHWILPELLEDKDIRQAAICSECGVCEVYACPMGLQPRVVNSLIKGELAQAGIRYSREGDTWEADANRPYRKVPTKRIAARAGVGDYYHIDGHTYKEETASKVVLPLKMNIGVPAEPVISDGAHVEKGQLIAACPEGKLGANLHASISGTAHLTGNAITITEVMLETIGFLELNSIAKGVEAADLILKTAEVDLIFAKAGCPGKYYILFTGEVAAVKASLDAGAAIGGNHTVDSCVIPRVHPQVIKAINLAAEPGTPGAIGVMEFFSVTASVYAADAAVKAADVDLIDVRLGTGIGGKSFVVLTGEVAAVREAIECGIHTENAEGMEVSHVVIPNPRKEIFDSLLMAHILSVHILHCGDEIQIVEAFAEHDFVRGSSERPCAVMCKKYMMPMEQEKQRIIQEFVPGKQVTLAHVIANPDSSLYKKLGVIGDYTGALGIMTITPSEGAIIGADVAMKAANVEVVFVDRFNGSLIINGTVADVEAAVKDVLNVLENTLHFAPTVITKSMKKIILIGNVACGKTTICQYLNHMEIKYKKTQALEVYNTTIDTPGEYLENRGYLRSLMVTATETDQVVFVQDASRDQFFFSPGQSSAFTLPVAGVVTKIDIATPKQIADAVELLQLAGADPIFKVSPMTGEGMEELVAFLEEKEAAAEAMENNVKKKKYITKPMYSRTLLYSIVNVTVEICYDECRGDSNEEMKNENERFVEMGKRIKARRVSLGMKQMELAERIDISNNHISSIERGIERPGLESFIRICDVLDVTPDYLLLGSMKANDIPKNITDNLKLCTDEEVRFVEAMTQYMIEQHKKMRKRLQDLTIKDAFMFAAVMSNAEQCRHLLELVLEMKILEVNVVAEKTISYHPEYHGVRLDVMAEEAGTKRRFNVEMQVKTESALAKRSRYYHAQMDMDALLAGESYDKLPDTYVIFICDFAPFDSRLYRYNIRNVVRETNELLKDGNQTIILSTQGTNPSEVPVELVNFLKYVGQDTDEAETNDDYVRLLQEQIKRIKQNRDWEGKYMLLEEMMRDEREEGRQEGQERMSQLILLLLKQNRNEDIAKAAADRDYQEQLFKEFNLMKSFKTLRMVITIVDVVCLLAVLLVPALEVAKHNFFVWLILGLLTLYVLFMWMVLGRRNTNGYDAESDREADISKELLSQRNKWYMMNSANKKTAVLLELKVHLKMYDEILIGQQFFVLTSFLSRICSRRICWNSYNFMAMNRKIIGILGLVGLVLTGCAAPEVETEQTMMGSYSSDEIMQDNGRKIEKHFQNEGEDGVLDINAVVDIPDISLKEGVIQSKEWDISMLENMLCPGTDMTLEQNSQSDYTRYIGGAAYNDLDYDTYFEISKLDNSLTYCNYKLDDYFVNEAFELVKEADWTESEQKFVKKMEENSLDLYSKLGIEAEVANTDLTVSNEKQYCSVKMLRTLDGCSWLDAGGEPVCDTIQIAEPGINVLSVAEQYTTKDVKEASVLSIDEIMQIIDDGVKNGNIHTYIMEEKGFDYTIQSIRMGYMTQIEDGAMHFFPVWYFQCKLGEKGITLLALDARNGAVIYMGMKKIMLKRSILNIRMLFVIVVNFAILFVSLFEYGIITADGKTPGSTYDILTMYTIPFAISSFIIFAGIFPGLPYAFSYLEERNSGYLKYIRTRINIGKYAKYKVLFSGLSGGLSVMIPGVMIFAVICLIGRKVIPGDNGHIFKQLMWAPYMYIWGGRFVLLLKAILLFLFGAMWAELALLFSNIFKNRYVAYVLPFLAYELMWLVFPVGIWNPVYLVRSDFGRNIPVFIPYLIDIGYIVILCIINMVLMKRRGRQMNINFRQIILVLLGQLRAALMSKRVLIGYLIGVMAALKAAYLYGGYASNHPIQIFEPWLMNFRSLADITIMLVGFILVVADAPFVDSRSLLTIYRTSRGNWYDGLCLYVLVQGIIYFALSLTASCIYTIPHGYIQNQWSVAMKQLVLWPSDKAIITWHLVAPDKTLIEGVLPWESVFHTFLLMLLYSLVLGMLLYVLNAGINKAIGTIAAAAVHVSGIILMNLNVSYKITRWSLLKNSSYLWHFEAKLDLVFSYALFLLCYVCILFIGPIILKHADFRYSVGEENDMTKKYRWIFGILITICMSIILILISSIALDYHRNVWRYLGGPVSDGIVPQKVIEWLLIVTPVWTICGWWLNNQFSLVQMTVFRYGNIGVWWKQQIKEVYLLHSWYYILMFVVLKLRIQKYWTANLYLEILMILIHSLFMLTIMILVRIVVNNMLASFTCILMLEILSIYASAQKWFSPKYCPFVWGMYNTSNQTYPNKGYDIEKAIVLSVVFIIVLNAAIFVDKKLLKRSLSHGKNRTDRSEMEKIELIGVNKSFKEEKVLKDICLTLTDDKIYGFVGRNGSGKSVLFKIICGYVIADSGKIMIDGKELGKDIDFPEELGALIETPGFIWYQSGFENLRYLARIRNKISDSQVKDAIRQVGLNPDSKKWVGKYSMGMKQRLGIAQAIMENPDILVLDEPMNALDEEGVEEIRQLLLKYRQLGRCILITSHNREDIEILCDEVFEIKSGVLQMRKSGNLWLAMIAALILVCVMAIAGCGKQQAGAGSGSEQSAQSALEHVLSCIVQEAADFETASEEIKQAAEETGDETGIVSVDGLETYFQGRFGDDLTEDCLNKMMADRTIAVSIKLAEQYQSDILAEDIQLTKRSGNEDMYDFEAKLGTAADSKKIASVTGVVTMEESQSSWKISNLTVKVTELMKSFKTLRMVITIVDVVCLLAVLFVPALEAAKHNFFVWLIIGLLTLYVLFMWLVLGRRNTNGYDAESDREADISKELLSQRNKWYWMNKKKRIVIALGGNALGNTLPEQMAAVKVTSKAIVDLIEEGCEVVVTHGNGPQVGMINNAMIALTHEDAQQPNTPLSVCVAMSQAYIGYDLQNALREELFNRGITDIPVATMITQVRVNEDDPAFNNPSKPIGKFFNEEQAKMMEEKYGYIMKEDAGRGYRRVVASPKPAEIIEIGTIRTMVESGDLVIACGGGGIPVTRQGNHLKGASAVIDKDFASCLLAQELDADFLIILTAVEKVAINFGKPNEQWLEDLTVEEAKKYMEEGHFAPGSMLPKVQAAVDFASSKEGRTALITLLEKSKDGIQGKTGTRFHLMDAKLQAYIDKLNALNFKEMYNGDFFLTWEKSDDELEAVFTVADALRYMRENNISTKVFESGLGISLFRDNSTRTRFSFASACNLLGLEVQDLDEGKSQVAHGETVRETANMISFMADVIGIRDDMYIGKGNKYMHEVVDAVTQGNKDGILEQKPTLVNLQCDIDHPTQAMADMLHIIHEFGGVENLKGKKIAMSWAYSPSYGKPLSVPQGIIGLMTRFGMDVVLAHPEGYEVFPEVEAVAAENAKKSGGSFTKTNNMAEAFKDADIVYPKSWAPFAAMEKRTELYGNGDTEGIKALEKELLAQNAEHKDWACTEELMATTKNGKALYLHCLPADITGVSCEEGEVDASVFDRYRDPLYKEASYKPYIIAAMIFLAKFENPQEILKKLEERSMPRIFKMLDFNKIKEVAQGYQADMTAFLRAIVKNPGESCDEKAHVETIAAEMKKLDFDEVVIDPQGNVIGYMGTGDKIIAFDGHIDTVGIGNINNWTFDPYDGYENETEIGGRGVSDQCGGVVSAVYGAKIMKDYNLIPEGYKIMVVGSVQEEDCDGLCWQYIINEDKVRPEFVVSTEPTDGGIYRGQRGRMEIRIDVKGVSCHGSAPERGDNAIYKMADILQDVRALNENDDADETEIKGLVKMLNPKYNPDWEEARFLGRGTVTTSQIFYTSPSRCAVADSCAVSLDRRMTFGETWESCLDEIRNLPSVKKYGDDVVVSMYNYDRPSYTGCVYEIECYFPTWAIPKDHKVTKALEAAYHGLYGDKRIGAADTLEMRQARPLTDKWTFSTNGVSIMGRNGIPCIGFGPGAEAQAHAPNEMTWKQDLVTCAAVYAALPMSYCEMANKADNQIKWVLNKMPKSDDKQVANMSLEEMSKANNFHKSFPQYSVTPLTGLPHLAEYLGLKKLYVKDESYRFGLNAFKVLGGSYAIARYMAQQLGKDVSEVPYDVLTSEKLKEDFGQATFFTATDGNHGRGVAWAANKLGQKCVVRMPKGTTQTRLNNIAKENATVTIENLNYDECVRMAAKEAAETEHGIMVQDTAWEGYEEIPTWIMQGYGTLALEADHQLEADECRPTHIFIQAGVGSLAGAVVGYFANRFKENPPIMTVVEAKAADCLFRSASKGDGSRVDVTGDMLTIMAGLACGEPNTVSWDILRNHADAFVSCPDWVSANGTRIYSSPMKGDERVISGESGSVTMGLVAAIMTKPELKELKEALKLDENSQVLLVSSEGDTDPDRYREIVWEGLCGTDKEPFADLQENMNSKEDLGRKKGRRLSADDLFNMEGKPSFLQAFPLSLQHVAAMIVGCVTPAIIVANAAGLSDSDSVILIQAALFVSALTTLLQLYPLFHGSAYAIGSGLPMIMGISFAYVPTMQAIATQYDVATILGAQIVGGIVALLVGLFIKQIRKFFPPLITGTVVFAIGLSLYPTAINYMAGGTSNEHYGAWQNWLVAIIVLCIVTYLNHYGKGIFKLASILIGIIIGYIISIFFGMVDFSSVTGASLISIPQPLHFGIKFDPSACVAIGLLFAINAIQAIGDFSATTTGGLDRMPTDEELKGGIVAYGISNVVGAVFGGLPTATYSQNVGIVASTKVVARKVFRIAAVILLVAGLVPVFSAVLTTIPYCVLGGATISVFASITMTGIKLITTQPLDFRNTTIVGLAIALGMGVTQANAALATFPAWVTTIFGKSPVVLAMVTAVVLNLLLPKPKGSAVEPAEEKAEMMLVIGNGKLFTRNDEMPFVENGAVAIEGTKIAAVGETEAIKKQYGDAEFIDAKGGVIMPAFINTHEHIYSAMARGLSIKGYNPKGFLDILDGQWWTIDRHLTLEQTKYSAVETLISCIRNGVTTVFDHHASFGQIGGSLFTIADVAKELGVRACLCYEISDRDGMDKARESVMENAEFIRYALKDDTDMIAGMMGMHAQFTISDATMELAAANKPDEVGYHIHVAEGIEDLHDCLKKYGKRIVDRLMDFNILGEKTLLGHCIYINPHEMDLIKDTNTMVVHNPESNMGNACGCPPTMELVHRGILTGLGTDGYTHDMIESYKVANVLHKHHLCDANAAWGEVPKMLFENNAAIANRYFKTPLGVLKEGAAGDVIVVDYNPPTQLDASNINGHILFGMTGRDVVTTVANGRVLMKDREIKVIDVEEAMAKCREESAKLWHSINGMSDRMTGMSFDQLMNWVTEELENHGTLFGLHRAYKAPEEALTIFGRDLETPIGPAAGPNSQLAQNIAASYYAGSRFFELKTVQIMDGDELAACVNKPCIKADDEAYNCEWSTELYVPQAQDEYIKAWFLLSFMAKEYGLGSMDGFQFNISVGYDLEGIKSEKVNTFIESMKNAADTETFKVCKQYLLDHVSEFKHVTAEDIEAIRPDICNSVTLSTLHGCPPQEIERIATYLLTEKKLNTFIKCNPTLLGYEFARETLDKMGYDYIAFGRFHFEDDLQYVDAVPMLQRLIKLSGEMGLEFGVKITNTFPVDVKAGELPSEEMYMSGKSLYPLSISLAAKLSREFDGKLRISYSGGADAFNIDRIVGCGIWPVTVATTILKPGGYQRLQQMADSLEAMGVGEFKGIDVAALNKLAEDAITDAHHVKPAKLPASRKSNETVPLLDCYTAPCQDGCPIHQEIPTYVALAGEGKYEEALKVILNRNALPFMTGTICSHPCQGYCTRNFYEKSVQIRNTKLECAEQAMDAVIDCVSVTGDYSGSVAVVGGGPAGMAAAYYLARLGAKVTIYEKRERLGGVVSAIIPNFRIDDSVIAKDAALLEKLGVKVLYNTEAPAVDVLKKEYDSVILAVGAYKRGELKLEGGEAQNALAFLEDYNRTNGKMAIGKNVVVIGGGNTAMDTARAAKRCDGVEHVYLVYRRTKRYMPADEHELVLAVEDGVEFRELLAPEKLENGQLICRVMKLGELDASGRAGIVETDETVAVPADRVIAAVGEKVPTDFYEANGLQVDDRGRVKVSPTLESSVENVYVIGDGLYGPSIVVKAMAQAITAAEAICGREISGSCDIAADPASIYAKKGILAEPGDKPESERCLGCSTVCENCVDVCPNRANISIKVPGMAKAQVIHVDYMCNECGNCKSFCPYASAPYLDKFTLFAKEADMADSKNDGFAVIDKEAVTAKIRFFGKETTWTKGQESSVPFGLLKVIEAVCAEYSYLLPMIHHMIMTADEAIEKLKSGNMRYLLMNSNSGNVSAALRKFTYEHGQHPHAIIVTCSDSRVIPETIFSAGLGELFVIRVAGNVIDDHQLGSIEYAAGHLGSPVVVVLGHTHCGAVDAAINSDPEGYIKFITDEIKLAIGDETDDYKACCLNVKRSVALIEHSLDIQQIEEQEGLRVVGAMYHIEDGSVEFLMREEQKGAVKNSIGRIFITALLILIQVVWLIELFVRLNKYSTGISLVSSAIALIVVIKIYGRDMNSAMKMPWMILIMAFPVAGVGIYLLCGHSGVNIGIRKHFQALQSELTPLLPDKEDILQKMSDEDRQTANMAHYISHSAGYPVYDNTDLEFYPEAVDGFEAQKEALKQAKKFIFMEYHAIEDAQSFAGMKSILFEKAKEGVEVRLIYDDVGSMGFINTDFVKQMESQGIQCRIFNKIVPFVNMFMNNRDHRKITVIDGQVGFTGGYNLADEYFNITHPYGLWKDTGVRMEGDAVRSLTVMFLEMWNAIKKTDTDYTAYFPEITYTAKQTGYVQPYADNPLDDEHTGENVYMNVLNSAREYAYFITPYLLISDEMKKAFTLAARRGVDVRIITPGIPDKKFVYQATRSYYNRLVKKGVRIFEYTPGFCHAKQCVSDDKAAVVGTINLDYRSLYHHFENAAAFYHKDAVAGVKADFDHLFEECHEVTEQYRSHRSTALRIGQCILRLFAPLLMSVYEHSLAVARMCLRIAKYFPGEVDMRSLVRGALLHDYFLYDWHIPDESHKWHGVTHAGDALKNARRDFELNEIEQDMIRKHMFPLNPVPPKYRESWILCMADKICASKETVKRHMSNLTTNDTQLFVGIDVGSTTTKIVAINPEKHEILLSDYKRHNAAQAQSVQDALAFFEDKFPNARIRLALTGSGAKHLAEALGCCYIQEVVANSIALQKEYDNVGTAIELGGQDAKMIFFRRDPATQTLNVADMRMNGSCAGGTGAFIDEIASILKVPVEEFNELASQGSCIYDISGRCGVYAKTDIQPLLNQGISRQDLALSSFHAIAKQTIGGLAQGLDIQKPVVFEGGPLTFNPTLVNVFAKRLGLTPEETLRPTHPEIMIAYGAALSLDGMFAGNSSWYMPKHYLDLLENPELRAHLQASADGPLFFESEEEHRAFNERHQLPEFAPYVPQKGETVHAYLGIDSGSTTTKFVLMDEDENILDSFYAPNEGDPLTVAKTALLTIHDRYEKTGAKLDIIAAGTTGYGELLFSKAFNTECHVVETVAHARAADKYIKDATFILDIGGQDMKAIWIDNGIITNIVVNEACSSGCGSFLENFASSLHIPVEEIAEAAFSSKHPASLGSRCTVFMNSSIVTEQRNGKQSADIMAGLCRSIIENVFTKVIRISNLDSLGDKIVVQGGTFRNDAVLRALEQYTGREVIRAPYPGIMGAIGAALITKKRFEQNHPAKTFIGIDGMADFSYTQEANAPCPFCANHCKRTIVRFSNGNSWVTNNRCERGEILGDPKDASVRQQLADAKKSREQTPNLFKLRQELLFKDYPYPKAAKERDITIGLPRVLSYWETMPFWTTFWRALGFKIQLSDLSTRKIYEDGLSAVTSDTVCFPAKLVHGHLRNLVKKGVDRIFMPSITTVTSENTESTSESMCAIVKGYPIVIRNSDNPEKRWHIPFDAPLFHWYKREDRNRQLTGYMEKAFGISPAETRQAINVADAAEKQFHDEMHRAGKAVLDEVTANGSYAVVLASRPYQNDALVNHDLPEMFTSLGIPVLTADSLEEADHVDLSMSRLDIVNNYHARMLSTAILAARNPHLEYVQIVSFGCGHDAYLSDEIIRLMKEISGKTPLVLKLDESDIQGPLRIRVRSFTETVSMNHAIHPELDIHPLEDPYPVKFTKEDCRKKIVLVPNTSHAFCRIMSAAMRGQHIQAEPLEIGREEAIRLGKQYVHNDICFPCQIVIGEALAALKSGKYDGKEVAIGMGKYIGDCRLTHYSALLRKALDDAGFHDVPILTNDDVDYHNMHPGFRMSLGSAIRLAFALPVIDVLEELLRKIRPYEKVAGSTNRAFEKGMDAIVEGLELHGISGLKKGFKKAIDLLNQVKYDRTNRRPRVLIVGEYLLNFHPGANHDIENYLEHNGFEIIEAHMTDVIQKSYFYLDAQIKEYKLKKPLNKKIWFSTVDTVFDMAHNMADAIAKKHPLYTPACRMPDLVKASDPIINHTFDAGEGVLIPGEILHHAKDGCRSFVILQPFGCLPNHVVGRGISKRLKEMYPDAQILPLDYDPDVSFANIENRLQMLIMNAKSGNIKDKNMTYTEQCVPLIRHIHCAMEKEANNKLREMDLTVSQIYLLQALNHAPDGTHTLTLKALEKQLQIGQSTTVGLVKRLQKKDFVTCTQSIDDKRIKIVALTAAGKNICCNAEAHMTHVFDHMSEGLSENEKKILLTLLTRVQQNLIPHQDSQMNPESMEYRQNDWSILGFGCMRFPKKGGSVDMKETERELAYAIAHGVNYFDTAYIYRGNEKVLGELVAKNHWRAQIQIATKMPHYLIHSIDELEKLFCEQLKRLQTDYVDNYLMHMLPDVHIWKKLVRMGILDWINEKKENGQIRRIGFSYHGNSQNFIALLDAYDWEFCQVQYNYMDIHNQAGAEGVAYAAKKGIPVIIMEPLRGGRLVNGLPKKAKDLFAAAEPKRSPAEWGLRWLWNQPEISVVLSGMNSMAMIQENIRIADTVKVGEMTETDGAMFEDVRNAVNEKMKVPCTGCGYCQPCPYGVDIPGAFRCYNVRYTDNFFTGMREYLMCTTFRAERTNASLCRQCGKCEQHCPQGIAVRKELKQVVRHMENPVYKVIAFFAKDMFKKMIYLDSSATSFLKPPQVAEAVFRSFNTIGNAGRGAHAPTLNASRLIYDTREKLAALFGTPDPSRIAFTCNATEALNIAIHGAIHPGEHVITTACEHNSVLRPLYLKEKEGTELTIIPADKKGRIRYDLLESSVKSNTSAIVLTHASNLSGNVTDLAFVSNFAKKHGLLLIVDASQTAGSLPINVVKMGIDILCFTGHKGLFGPQGTGGLYVREGLTLSPLKSGGSGIHSFDRQHPTDMPTALEAGTLNGHGIAGLNAGLDYILSTGVKNIHAKEISLARRFVNGISEISDLKLYGDIDAPLRTPIISLNIGNMSSASVSDILWEDYEICVRAGAHCAPLMHKTFGTEKQGAVRFSFSCFNTEAEIDTAIQAMHEIAEMNTTPVYFTGIDIGSTASKTVVLKEGKIEDYFVLPTGWNGRETANAILEQLKSRGYADDMRCVATGYGRICVDYADKIVTEITCHGKGGWAIFKKNMTIIDVGGQDTKMIKVVDGQVADFLMNDKCAAGTGKFIEVMATRLGADLNEMYELAAKGQPLAISAMCTVFAESEVISHIGSGEKREDIAAGVIHSVANRVANLAARFGVEENIVLTGGLCESPYFIQTLSDKLEHKVETDAFARYAGALGAALTAAKRRDLVMLNLPANFETYAEARKSGFMKMKEIKDNGGRIVGVYCSFVPQELLMAAGAAAAPLCASSDEPIPAAETKLPRNLCPLIKASYGFALTDTCPYFYFSDFIVGETTCDGKRKMFELMNELKETYVMQLPHSRDDAALRSWTEEIIRLKEKLEDFYHITITEEDIRDAIRLKNHERRAMLGFLELGKLNPAPISGYEMGTRLDGLGFNFNLEERIAIIEERTKEVLTDWEANYKGKASDRPRLLITGCPNSGVRDKIIKTVEELGADVVAFDCCNGTREKVEPVDENMPIYDALAKKYLNINCSVMSPNNSRMQYIDEMIDEYQVDGVIEIILQACHTYNIESHYVKQTVTNKGKSYLMIETDYSQADKGQIRTRLEAFLETLEKMDFKQLHSFISVVRCRSFTEAAEELGISQPTISTHIRILEEELNSRLIVRTAKSFEVTPRGMELFECAQNILKLRDDMVSRWNGHGSKVIRLGVSTIPSAYILPEVLPTFGKSHDDIYFVVTQSDSRGIIDAVHKGSYDLGLVGMKTDDEQLVFKKFYQDHLVLIAPVTDYFLEMKDTGNFSLENVLQEQPVILREQGSGTGKSASAFLEKIGIPEDKLHIAARINDQEAIKNLVAGGLGVSIVSEKAVHDYIDAKRLLQFELPGHIAGREFYIIYHKDFILKDYVCEFIKYLEHCYKQMPQRTDIHKVLIIGSGPIIIGQACEFDYSGTQACKALKKLGYEIVLVNSNPATIMTDPETADVTYIEPLNVERLEEIIAKERPDALLPNLGGQSGLNLCAELNKAGILDKYHVKVIGVQVDAIERGEDRIEFKHAMDKLGIEMARSEVAYSVEEALAIADKLDYPVVLRPAYTMGGAGGGLVYNKEELKTVCARGLQASLVGQVLVEESILGWEELELEVVRDKDNNMITVCFIENIDPLGVHTGDSFCAAPMLTISEECQKRLQEQAYKIVESVEVIGGTNVQFAHDPVTDRIIVIEINPRTSRSSALASKATGFPIALVSAMLATGLTLKDIPCGKYGTLDKYVPDGDYVVIKFARWAFEKFKGVEDKLGTQMRAVGEVMSIGKNYKEAFQKAIRSLETGRYGLGHAKNYDTMTKEELLHLLINPTSDRHFIMYEAIRKGATTEEIFNLTKVKTYFIEQMRELVEEEEEILKSKGHLPADALLIQAKKDGFSDKYLSQLLEIPEEEIRNHRISLGIEEAWEGVHVSGTKDSAYYYSTYNAKDKNPVSEAKPKIMILGGGPNRIGQGIEFDYCCVHAALALKKLGFETIIVNCNPETVSTDYDTSDKLYFEPLTLEDVLSIYKKEKPLGVIAQFGGQTPLNLAAELEKNGVKILGTAPAVIDLAEDRDLFRAMMEKLDIPMPESGMATTVDEALEIANKIGYPVMVRPSYVLGGRGMEVVYDDESMVGYMAAAVGVTPDRPILIDRFLNHATECEADAISDGTHAFVPAVMEHIELAGVHSGDSACILPSVHISPENVATIKEYTRKIAEEMHVRGLMNMQYAIENGKVYVLEANPRASRTVPLVSKVCNIRMVPLATDIITSELTGRPSPVPELKEQKIPYYGVKEAVFPFNMFPEVDPVLGPEMRSTGEVLGLSESYGEAFFKAQEAASLKLPLEGTVLISVNKKDKPEVVDVAKRFHEDGFKIIATGKTCDLLNESGIPAEKVKKLYEGRPNILDMITNGKIDLVVNSPAGKESVHDDSYLRKAAIKAKIPYMTTIAAAKATAEGIGYVKAHMEENNRVKSLQQMHSEIQMKKTYKIDVDCANCANKMEDAANKTAGVKNAVVNFMALKMSVEFEEGAAPKDVMQEVLKNCKKVEDDCEIFLMNKKQKKVLTRIIIAAVLMIAFSFLPVEDYTAFVLFLIPYLVIGYDILIKAGKGIKNHQVFDENFLMAVATVGAIALGDYREGVAVMLFYQIGELFQSYAVGKSRRNISDLMDIRPDYANIERDGEIEEVDPDEVEIGSIIVVKPGEKVPIDGVIIEGTTTLNTSALTGESVPRDASEGDEVISGCINMTGVLRIKTTKEFGESTVSKILDMVENASSRKSRSENFISKFAKYYTPAVCYGALALAVLPPIVRMLFMGFSPEWGDWIMRALTFLVISCPCALVISIPLSFFAGIGGASNAGVLVKGSNYLETLAGTKYVVFDKTGTMTQGVFEVTGVHHNTLPMNEILEYAALAESFSSHPISRSLQKAYGKAIDQSRVTDVQEVSGKGVIAKVDGRTVAAGNAKLMELEGIPYQECHSVGTVVHMAVDGEYVGHILIADLLKPHAEEAIRALKVAGIKKTVMLTGDAKRVADKVAANLGIDEVHSELLPGDKVAMVEKLLSQKNEKEKLAFVGDGINDAPVLSRADIGIAMGAMGSDAAIEAADIVLMDDDPLKIAKAIRIARKCMRIVYENIYFAIGVKVICLILGALGIANMWVAIFADVGVMVIAVLNAIRTLYVKNLMDQLHEKYENLKAYLKSLGSVAVAFSSGVDSTFLLKVAHDVLGDKAIAVTAASCSFPERELNEAKKFCAENGIQHIVCESEELDIDGFRQNPKNRCYLCKHELFEKVWNIAKENGLNAVAEGSNMDDNGDYRPGLVAVKELGVSSPLRAAELNKQEIRELSKELGLSTWNKQSFACLSSRFVYGETINEEKLGMVEKAEQLLLDLGFYQVRVRIHDKMARIEILPSEFEKLLAEGIREKVYNYFKELGFTYVTLDLGGYRTGSMNETLHMKKHLFSLLQRIGQSFMLPIALLPIAGIFLGIGSSLTNTNMLAAYHLKGLMGPGTAPYILFSLLNSAGSIIFDNLPILFAVGVAIGMARSEKATAALSSIIAFFVMHSTIGSLITYTGRSHSFLTGATTEIVGITSLQMGVFGGIIVGLGVAALHNRFYKIELPKVFSFFGGTHFIPIISAITYVGIGILMFYIWPPIQILINDAGKLVLMSGYGGTFVYGLLERALIPFGLHHVFYMPFWQTAVGGRELVNGQLIEGAQNIFFAELASPDTSHFSVAATRFMSGKFPLMMFGLPGAALAMYTCARPENKKAVGSLLLSAAISSAVTGITEPLEFAFLFVAPPLYVIHCAFAGLSYMLMHMLNVGIGMTFSGGFLDFFLFGILQGNTKTSWLHVIPVGILYFIVYFIVFRVMILKFNYQTPGHEKDNAAPVNNADNKSQQILDGLGGLENISDLSCCATRLRVTLHRPSKLNKEKLLATGAAAVVANGDGVQVVYGPEVTVIHARLQDYISQIIPASSSTADNSAAVPTTSAEVSNPAVSAEAKDSDNLSVADAITDIVYAPCNGTVIPLKEINDGVFSEGYIGEGLAIEPVDGSFYAPFDCSVAMVFDTHHAIALHTANDTELILHVGLDTVKLNGQHLEVFVQEGQKIQKGDLILRADLEGIQSAGCRTVTPVVITGAGGAESVELLKTGPVHIGDAVLKVHYMMYDEKRTGGAGMVEKEEFYLNSTNGVNKLHVILWHPLEEIRAIVQISHGMCEYVDRYDRLATFLAQHGMMVIGNDHLGHGETAKGEEELGYFPKAKGSETVVDDLYKVTKSIRARYPRIPYFLLGHSMGSFMARRYLMTYGSQLDGAILMGTGSQPPALLSAAKTTANSLSVVRGEHHRSQLMMKMAFGSYNKQYPSVRTEYDWLSRNDANVDTYLEDPYCGFMFTLNGYKVLFDVLSFIQEPAHISKLPKEVPLLFVAGSDDPVGHFGKDVPEICRIYREAGVKNVEMKIYPGDRHEILNELDYEQVQMDILSFIEKRLEALEAMTFERIDMEQWPRREHYRYYNEQIRTSYEMNVELDVTKLRKRCLKKGIHFYPAMMYAIMYSINHHENFRMALDEEGHLGVYDICHPSYTIFHKDDETFSDIWTEWNEDFSIFYKDVCRDMKQYKDSKGIKAKPDRPDAFTPVSCVPWVSFTSVGHDTPGPRQMYFPIIVFGRYHEVHDRWMLPFSIMVNHAVADGYHTSMLIHDIQEQCSHCKKWLKKMSVFDILTMIGGLALFLYGMEVMGNGLSKASGGRMERILEKMTDNIFKAVLLGAGVTAVIQSSSATTVMVVGFVNSGIMKLSQAVGVIMGANIGTTVTSWLLSLTGIQGDNFILTLMKPSSFSPILAVIGIGFLMFSKNEKKKDIGTIMIGFTVLMFGMETMSDAVKPLADVPEFANILLMFKNPLLGMLAGLVLTAVIQSSSASVGILQSLCVTGAVSYGAAIPIIMGQNIGTCVTALLSSIGASRNAKRTAFVHLYFNIIGTTIFMIGFYALNAFVHFSFIDNMANPAGIAVIHSVFNIFATAILLPFHRGLEKLAILTVRTSDEDEKQSVQPAEEGQDMLLLLDDRFIEKPGFAMENCYSVTSHMAELSRQALFIAMELLQKYDETKAENVLKLENKVDHYEDRLGTYLIRLSSRDLSEKDSKSLSMLLHCIGDLERISDHAVNIMEKAQEMNEKNLSFSDKGAQELEVYSRAVRDIMNMSIEAFKNDDIHLARQVEPLEEVIDYLNDELKQRHVRRLRSGECSVELGFVLSDITINYERVADHCSNLAVDLLRIHENVFDVHEYLEGLKENKDAAFREAYQKDKAVYALPQSMATIYILEDDLNIQEIEAYALKNSGYQTEGFDNAREFFKKVSERVPSLLLLDIMLPDADGLDVLRKLRSMPETKKLPIILVTAKTSEIDKVKGLDVGADDYITKPFGIMELISRVKALLRRSAYVEEKKFLTLGNVFMDDEKHAVYVSDQVCELTYKEYELLKLLMSNAGIVTARDTIMERIWGIDFEGESRTLDMHIKTLRKKLGEAGSMIKTVRNVGYIMSDKENMRGKKMKHKIYLQFCLIAALAILITTTIVTALFYQRFKAQVFSDVRTYAYVLTSVDTYDEATLIQEVHQLDNLRVTIIDKEGKVLLDTNADIGGMENHSNREEIKAAFETGEGQAVRQSKTVAKSTFYYAVRMNDGNVLRVATETGSVLSIVQGMLPIIAVMVVILFVICTFLGRLLTDSLLRPIEQMAENMDYVNEIAVYQEMEPFIDTIRRQHEDILKNASMRQDFTANVSHELKTPLAAISGYSELIENGMVSEKDIARFGGEIHKSADRLLTLINDTIRLSELDATTQDVVLETVDLYQAAENCMDTLEMSAKKHDVTLKLEGESCKIRTEKGMTDEVIYNLCDNAIRYNNKGGSVTISVMPVDNQIVLSVKDTGIGISKEHQERIFERFYRVDKSRSKSTGGTGLGLAIVKHIVARNGARMELASEVGKGTEIRIYFDKAAMAKKKKSVKKGLIIGISSVVVLLAAAYAGVGYYFHDHFYPGTVINETNFSLGTVEAAEAKVKEEAEDYLLAVHDREDRVSYISGSDIDYHYESDGSIQKMMDDQNSMLWPLHIGKEHSHTVEVKMTYDESKLVTLVEAMDCFKEENIVKPEDAYLKYTENGYEIVPEKQGSQPLEEQIMLDVKAAIDSRQSVLRLSDNDYVQPSVTSDDPKLQEKLQVTEKYKNMSITYEIEGSEQVLDGTTILSWLTINDDLSVTVDSDMAASYAQQLASKYNTYAATRSFETTAGDTVKIGGGDYGWVINKKGEAAQIVEDIKNGESVTREPKYEQRAFVEGADDIGNTYIEIDYTNQHLWYYKDGSLVVDSDIVSGNLNNGNGSPDGVFKVISRQSPATLKGEDYESDVTYFMPFAYNVGLHDASWRSSFGGSIYKNGGSHGCINLPYDAADTIYKNVELGTPVVAYYREDVKLTSNNAKVSNAYSYSSKMYFLIGLGIIVIIVYGNMLYDRIKTKKNKDTTDVEKSAGTADNHFAEQKETKGQKTEINRQAPDQDQSGSMVKTAANIAFSGPTLTQMIADDLKQKKHIFGLPLTLCEERGDGQLIALDREDNIYVIETAQRADYEEFYLQILDDMAVQRKRIQKNAADRKVYAVVCVTTLPETLKLAAEKDNAIRIFSYELNFRNVMMKKWMLLLSLVLMIVIVNCGQAQAAEETATKDITFEELNDENVFIKQSRRGTCTLASSAMIMRRAAMLAGFENWEDITESSVGSVAWREGVGISWTFTYDGVTMTHDYVSSVEDLKKLLEEHPEGIVAYDSNKPHAIALTDYDAETDTFYCSDPAECCAKARVPVSEAIISLENVDVVWYVTSPSNLSAPVMAAAEANEAEENTEAQSVIPEIETAPVTSLDNLSHTELKLEMNMIKMILAIGHINYDKFLNNMLEMAKQHPEQMGGMKLPPFTAQMIKMLPARKKNEMVAQALNSSKGKVEPQIEQLLAPITGPIQLKNFDIQCGGKRDADEVTLTVEFAGYDCGYVADHILPFYYMEATAPAFLGPEYNGPTDLASVQAYIKAQDYKKAQFLIAKSMSVNKAYIMNLLQDKAKLAEIELQVNNLRLMIKMDLMKDIYKKELRTRIAAWEGKKTDDFQYEPERAELKAQMKDWLAEKLGVDDEKKLLIANRKYFATCMAELVYEETVRPNMKDFIHMVIKEMVHITPYHLDRMLHIYLPDDYEESEARYPVMYMYDGHNLFYNEDATYGKSWGLQEFMRQWENQLIIVGIECNHEGNKRLEEFSPYDFKDFDGQRIHGTGKVFMQWVVDELKPLIDTHFRTKPEREYTGIGGSSMGGLMAYYTVVAHNDVFSKAACISSAVGFCYDAMREELTSAGPMLPDTRVYMSWGSKESGRKPGLVKYTCTNLEFSHLLVERGAVTYPYLQAFGGHCEADWEKQNAIYMPFLWNGVFEDGMEMSAIFAVAGKLVTLFIYVLVGYVVSKRKMISEGFSAGISRFLLVVTIPCLILSTFETDYTFERLVKAGEVYVISLIIFGASILIGYLTAWIFRISEESKSVWIYSVTFTNHAFMGWAVMDAVFGGESIFYATFANLAFSTYAYTYGVWLMRSTGTEAGKKHSMKEYILTPVNAAIVVGLIMFIFQLRFPAPVDNAVQGMSSLTTPMAMLYVGTILTKSSIKDVFSDWRTYACSFVRLVLIPLLVLMIARPLIHDPMIYGVLVIGHAMPVAGFCAIFAGEYGNDVVLASKFIFITTLLCIITIPIFVMLLMKKINYGSFVCEVSVDPDYMLLKHGLCDYERDTIAYAVERFFTRCRKAGKACTEESIQIRVAKGKAKRKHAFMYLAPAILMELPEGWVRVWGEVNAAGVEINKIEILREHPCFAEYAAMAKKILMLCGDFTEDYETMVPFQALSMLGYQVDAVCPDKKAGDVVKTAVHDFLGDQTYTEKPGHNFALTADFDTVNTADYVGLFITGGRAPEYIRLNPRVIEIVQEFFAAKKPVASICHGPQILTAAGVLKGVKATAYPAVGPDITLAGGTYVEVPADQAVVDEAAQLVTAPAWPGDTAILAEFVKLLGAKIEIMNTAIVNTITAAGSKAQYDACAKRLIGQKIILSHILVRTVEEFKGMKPEEVVLLIEGDPQIGTVPVSPGMTNRQNTNNSNTDVNQNITDVINASDISIPTNTRVGGLNTEDSEINEGTIRFDIIFYVRMKDGLAQMIINVEIQKDQPKDYHLLNRSIYYVSRMISSQKDRDFEHSNYDDLKHVFSIWICLNMDANSLTRYYLSSENILGNPKWKGTQDLLNIVLIGITREIPKQDEKYELHRLLGTLLSDKLAINTKFEIMKSEYHIPLNDDFRRDVNIMCNLGEGIEERAIRETTERVTKEVTKEMTEQFILNMYKKGYSLEQISDIMNKSTTEIEEIVNVAILPVMTEDEKFMKAALAQAKKAAAIDEVPIGCVIVYEGKIIARGYNKRNKEKNTLSHAEMNAIRKASKYLGDWRLEGCTMYITLEPCPMCAGAIVQARVDRVVIGSMNAKAGCAGSVLNVLQEKRFNHQVELTKDVLHEECSSMLSGFFRELRERRKKEKEKCIMYLADYHMHSKYSFDGSEELDTICQTAIRRGLSEIAITDHMDIYTGLPYDEQMNFEVPGGEQYHMDVSGLYAGLVQMKEKYAGQLKVRIGAELGQPQVNPEAAALFIRDYGDVLDFVIGSIHNMEKDLDVYYYDFTKIDVAKMYDHYVDWLLKLSEMGDFDVMGHLTYPLRYMFERNQLRLDLRPYEEKFRQLFKNLTEKGRGIELNVSGYYKAMQDAMPPMSILKLYRECGGEIITIGSDAHKAEYIGFYQKEAHEMLETAGFRYLTVFEHRKPEFIKLMFKINDNYLKLPGSYLFSTIAKKVAAYKEANPEKKDQIISLGIGDVTLPLAPAVIARLHSAVDEMAVKETFKGYAPDLGYEFLRSAIAQHDYKARGVDIAIDEIFISDGAKSDSGNIGDIFSVDNRIAVCDPVYPVYVDTNVMAGRAGDYNPATERFSNVIYMPCTEENGFAPELPEETPDIIYLCFPNNPTGATIPKTELQKWVDYALEKGAVIIYDAAYEAYISEDNVAHTIYECDGADRCAIELRSFSKNAGFTGTRLGFTVIPKALKCGDVTLNSLWARRHGTKFNGAPYIIQQAGAAVYTPEGQAQTQEQIAYYMNNAKIIREGLAAAGFSASGGVNAPYIWLKTPDKMTSWEFFDYLLDKANVVGTPGSGFGPSGEGYFRLTSFGSYENTLEAVERIKKLKMLDEIVTVVKKCGDIILFADGAERNVSSKEGRANFVTKYDVAVQAYLEEELLKILPEAVFIGEEGEHSKAIGEGYAFIVDPIDGTTNFIKNYHRSCVSVGLALHGTMEIGVVYNPYSNEMFYAQRGKGAFLNGQPLHVSSNRLEEGLVCFGTSPYYAELIDQTFDLVKTLHRASLDVRRSGSAALDLCDIASGRCELFFECRLSPWDYAAGSLIVQEAGGCISRMDGTGISLDKGCSVLAGGPAAWEDYFKLEGHMELSMSKVKIISDSTCDLSEELLAQFDVAVLPHPIVRDGELLQDNVTITPDDIYRHYEQTGRLCTTSAPNTYDYEMCWKPWLDEGYEIVHFTISSEMSTAYNQAMLAAEETGHVYPVDSRTLSTGIGLLVLEACDLRNQGFAAEEIAARVREDSAKCQASFLVDVIEYLWKGGRCSSVAAIGANILKLKPRIDVLNGNMLSTKKYRGKTAKCFAAYADDMLKGKDNIRQNRIFITHSGIAPDIIELVRTKINEWQPDVENIYVTRAGGTISCHCGPGTLGILYMYEMSKRNQRDAFNHFSMKKNGRGVDGMQISELEDYWKINHEQIEADLLAGNYQLGIVKSYEMIDGRGKRRVICSLNAIDRFVARLLAQKLRRYMEPEFCENSFAYQEGKGVAAAVEKACQYINEGYTIVAEMDIESYFDKIYRKYLNHVCNQLDEMYGEGRIAGVIEIFKRGFSFCERTGAFSLIKTKELLVAEGAIHAVRLKQKSKTKRKKKITAAIYEYQADCDGEWGEISVDFENGTAEIIRLADWDTIKTNWFANEAIRYILSLSPDALKKYMLVPLEPPLISMKPILNIENLTKIYGNVPSQTKALNGITFQVMPGEFLGIMGSSGSGKSTLLNCIATVIQPTGGSIQVEGDTLQSLKGKALAEYRGKKVGYLFQNFELLDNLTGRENILLPTSLHGVSETESSQRLKQLADYLEITDVLDKFPPKMSGGQRQRVAAARALILHPQMILADEPTGALDSKNARSLMEKLSGLNRDEQATILMVTHDSNAASFCKRILFIQDGVIFHELRRGDESQQEFYGRILKVMAQLGGGSANVLMFSNLILRNSRRSRKENSLFFSSLVISIVAFYMILSISTQDVMLFLQKMESDAVDKLLLLIPAFYGMTLGILFFLIYFACKYQFERRRHEFGVYLMLGMRRSKLFGMLLAEDCLTSILAMLIGLPVAVVLSEIVSLVTAKLVGMGIIGHQFSLSWSAIEWTLAGFLAIKLTALLILSGRISRQEIGTLLSQPTNRPKKQMPSVIYGLAAICGSVMLAVAYYMAIQGIAWTKVSMMGLTLLLGIVGTMLLFYGMRALIALIVKKGKGNKQLHVFTFRQIQENVIHQSNSIAISSLLILAALCCFGAGVGIAGTNNLSTGHVIDYTFEDHTVEDSAQVLPNIKAALKENGLENQFSELFEMRVGRIRTTEDYDNAYSMDAVMDSLRSLPQSEDRDVLLNNLDYATYPYLICLSDYNRLLKLSGNPALQLGEKEAAVYIDTELTTVSRTAMLNQVLAGHPKVELDGSPIHLTGEVQSVNLVTDRSITLSFALILPDEAFLYYSQGMYDTYVNAVLSEQALNGNSLMTAYLDLNEKLDEIDIEYESYLQNMGRQLFYTIASSYITLYLAIVFLVVANTIVGVQFLMSQQKTGRRYQTLIRLGATYETLCQSAGKQITWFMGLPVLVAAVSSLFGVRALFTGILSSRTRGTVSEMLLVSAAMILLLCVIEYIYMRVVRRSSDRYLLTLMQPQREEMKRIAVVEDEVYMREELCDMLQKDGYLVEAITEYEDAARLLAALRPDLVILDLNLPEISGFQICQELKNKTAIPVLVLTSRDQVKDELQAFQLGADEYLTKPCRKDRLLARVSNILKRYEGRTNLIEGPDFLLDQQTYTLYIHNTSVVLPKNQGKLLVALLSGGDALVTTGQLCMALWGTTEYIDENALQVNLTRLKKTMSGLEMKQQIVAVRGMGYRLETGVAPMKRLWRMIERYYPWLLLLLGVDCFCAIILWISDIRAFQTLIGLVVLTSILLFSAILFALNKRETTRRELFRDFLSDPTICNEERLLSAISREEGESIRLLASVLQEHKTENNSMADALQDYEEYVEGWAHEAKTPLSLLTMLLDNRSDEISPPLQAKLDYVRSQLQEDVTQMLYYARLKSSTKDYQFEDINLNDCLGEVLEDYAPLLEEKQFVILNKLQSETVYTDRRGLQFMLGQIVSNAIKYSSDSPMLTISMIHSETADVLSVEDNGIGVKKYDLPYIFQKGFTGDSTDSRKKATGIGLYLVKKMADDLNLRLEAASQWGKGFKIAIFYPKLRSSGGKMKTLISCAYNMDNCCVELKFSDGSMIAIDTIAVENEIADNMYQRSELDYLIYNDPIGYADLILNGDPETYLKTVTEYKPWDSMDILFKNDDFVFSYRVGGILMRNGKILLQRPKNDDYAIIGGHVAAMETSMETLKREFEEELHAKIEVDNLLAIGEIYFPWGKRPCHQICLYYNVHLVDDNIPLDGVFHGYDELDNERIDLDFCWVSLEDLKKGTKVYPLELIPYILEPGKEIVHFVSKQIMIENMKVEFGRTSDIDSWMRLVRKVSWNFPGLETEQSIDEHKIIVLKFMNDNRALCVKNKQDIVGVLLYSRKYNMICCLAVDPAYRKRGIASLLLREALDKLDRDKDITVSTLFQTQGTGGFMLSSSSASNRDNEIDSTVDHRTNGYRFRKESMMHKTDAAIMDTWFTTEPMIQAVLDTGLDTIGMVKQLKQRYSFQGISYTLPELRKFVDFSGAGNIFGSLVVRTKTGIPVKIVFVRNRNNKSECLYILSTDISLESSEIVRIYGNRWSIECFFKASKTFFKLGTEFQSHNYGAVVSHTAIVFTRYIVLEWIRRNQNDQKTYGELFFMFSEDIQDMELTDALQSLMALFAEHISSLSADITDVIKNKVTEWISTQAAFIQALFRNVCWESMPVYKDEKHNTWYVKLYYTDWTGQKRQKMKRGFKLQRDAKEWESDFLTQQAGESDMKFSALVELFLKDYKSRVKLSSYITRGSIINKHLLPYWKDTAINQIAPAGIRKWQQSIIGKGYSQSHLHQINVVMVQLMGYAVKYYGLKQNPCSIAGSMGKSDVRRLNFWTLEEFQKFLDTVRNPLVKVAFQVLFFTGLRVGELQALTLADFDQNAGTLTVSKTYHKFNKADHITPPKTSRSNRTVTLPPFLVDILKEYISHLYDMQQDDRLFSLVTPQKLKTAIKNGCESTDIKCIKIHELRHSHVSMLIDMGFTPFLIAERIGDTPEMINKVYGHLYPNRHQEVADKLNKLVSKMGLNEILKIGTRIKEYRKKIGISQKEMAKRLDIPYSTYSNYENNNRLPNQETLEKIMTELGISTEDLFIINDKTQYDYMYYLDTLIEWAEFNDYATDLSHSFEKELENGGGQSLFLEKKHKLYEFTPEEMLSISDFMKDVLFSFMENIIARKENVANIYPKELKRIVDIRNCLAYLSHEKAIDTQNPAADTSAPSDQDEMRVDRCKLSIELMKRDITQKQLAEMCGVSRVTINGIVCGRSCNNRTGYKIAQALGMELKDLVENMEFRAFNQNEDEPANGWTGETVRHALQQGKKLIVDQRGDIWELDQEGRQKEYCGKILRKEKQMSEYMNAKELAEMVSVSESKAYCFIRQMNEELKARGYFIVRGKVPRKYARERFGVSEMAICNGECFLNFNTHKHACLYFDLESTKRRPKDRLDKILGDAEKPDNLYIITGDDEPGRIGDGFEEQIELQLQAHPDIKLIIIDVFQLIRRPKKAGQDSYERDYEDLRVLKSIVDRHSIGLMLIHHTRKMKDPNDVFNELSGSVAIMGALDCSWVISKDDRFANEATLHITGRDLASEQYKIRFNRQSFRWEYVGTAEDIEMQRFQFEYEQSPLIYTIKQLLKQGGGHWEGSASDIQTASKYLGNEIYDDVRKIGTDINKYEPLLWTDGIKYDVKRKSRSRCYIFNVINVTDDTHVTDDTHVIDKMNLQEIVETIEELKSEYDYSFDEAVKLLQLVGLKDIIRISEEINSVLDDIGRAIDRTNDSINAIEEDIRTGKAFVKGEISTYNLNMTNWDELLQNLHKYVAKANKARNNAANIICADADILNTEYDRRMNALIKLERDAFVAGAELVIDFFTKKENKHDDKGIMTIKEFELQHAFCILVKTLSSWPVDDYEQARIVAHSVHSEHVERDYMQRVFEEADKRRPLLIEGVVNPEQTKSEPREYTPCGLPVRQSTAKQYRLTDRDKEYIKSFAADGVVPLDAYLCALEHLPDQYMKCMDELNTTTEEMDGMNAAAEASTDTKEVTPGTEQNDSDQTPPAPEKKYTDADVDRIIAKKIAQERNRMQKLFTEDQQESELDRREREVTKRELRADAMEALAHDGFPCSLADTFNYSSKEAFDESYKTLTDAFQKAVNEKVRNIFMFDDRVAHEAPKVGTGAPPDQSRAAFFSGKRMAINLVTKFQPYVDEAFTAGSKASMLTNHDFNWSGAHTIKIHKVNTVPMSDYDRAGTGENASRYGALGKVENTIEEMTLTKDRSFTFVIDTLDNDETDGVLSAAAALGRQQREVIIPEVDTYVYSVMTANAGTKVTSVTLTSNNLYDEIIQATETMDNNDVPDTGRILTVTPATYRLLKKCPDLDIDCDITAEQKAKGVVGMIDGMDVVKLPAKRLPAKFGFMIAHPVATVAPTKLEEYRTHDNPPGISGKLVEGRIVYDAFVLDNKKMAIYYEENKPVEMSNEELIELWDEHRPFIYKIALQYSGYAEMDDLMQEGYLGLYSAAIRFDQNAGASFLTYAAFWIRQRMRRYIENCCSTVRISSGMAARVQKYRKLQSDYQKQFGHKPSADEIRALMGISRSEYDTMQQAVRMGTIASLSAPTGEDDTVTIGDTIGNEGIEDAIIDRIDQEDMKRDVHAAVDKLPDREREVITLRYFEGLTMEQVGELESRSMESVRQCQAKALRLLRSPSYRRPLECYALSDKQLSAAMHNTVSGFNRTWTSATEKAAFIGLAADRVRYMSAGDSDEIQSIRVVATSGLLTNDNFIFEYLNHVCNQLDEMYGEGRIADMIQIFKKELQSYRICDDWSFSFFERHCIYKIYTMWTNCKNMPPWMLKTTELFINELKERDLKYRDIRTLQDGDDLVEVGFNLDSTRIQIMIFFDASEESVALRCFEVTRVTEEQYPNALLSCNELNNKMRWVKFCIGQEMNVHAEADALVDETTAAKVTMELMMRMASIVDEAYPMINKAIWSMQTELLTLIFEEAKKQCESKNDSVGLGAMYSAIISVGRDSHVLEGKTYDIQEYEALRRAVARDEPEGTVMPPVKSEDSLTGQEKQLCAFRIWLNMSTRSAVDAYQYLRQQVKTARETGHPEKMTAGTERPIKAMTETEHPVKAAAETEHLVKAAAEKEHSVKKPTMEQLAAKTVQIREQLMQKVIGQDNIIAEFANGYFEGELSVFTEKNRCSPKAIFLFAGSPGVGKSYLATEAAKALELPVKRFDMSSYADDVSASELTGAGANFKSPKPGALTGFVHDHPSSMLIFDEIEKAHPKVINLFLQVLDAGTLYDNKYEANIAFGETVIIFTTNAGKSLYQDTTKHNYSDVPKKVILDALEKKCHPVTGRPVFPQAICSRLATGNVLLFNHLTAHQLSTIAARKLMEQQASLYQEASILSEDAESLATTLLFSLGGHCDARNMTAAAKRFFSAELFELYRLAGTDRKAMAAGGIQKIRWQLDIDRAEPIIRQLYHVPEDNTFLFFGSEEARMQAQQMQEKGRMLYASNLDEVKQILQEHELSFAAIDYFHGRSEKTSYLNAGDVHSEGRKCWEVLQQYEPELPVFIWETDNYQYNREEVLSFLGKGAEDILHISFSDRNACEATLDQLQVQLWQQKALDILAFRHQVLKMAWEHGNLKTDTNTYYNITLFSSANIGRNYWFRDRYQMIMETDKDHIHYMIETEPTMSISKIVTLMKTYTTYHIWKRYPQYLRKQFWKEHTFWTDGYFACSVGNVSEEMLKRYIEKQGMLKAYKYRIYPNNEQKIQIAKTFGCCRFVYNQTLAYRKEVYEKEKKSVSKTDCNNYCNRQLKKEYEWLKEVDKFALTNAIYNMDAAYQKFFKEHAGYPKFKSKHDNHKSYTTNFTNGNIAVDFEGNRVKLPKIKNVKAKLHRNFSGQIKSATISQIPSGKYYVSILVETEHVELPHVNQNTGIDLGIKELCITSAGKKYENPKIIRKYEKKLIKLQRQLAHKEKRSQNYYKTKKKIALCHEKITNTRKDYLHKMSHEIISENQVIVSEDLQIKNMVKNHRLAKFISDVSWYELTRQLEYKAKWNGRKYVKIDTFYASSQLCSVCGYQNTETKNLSVREWICPVCGTNHDRDINAAKNILEEGLRQRAMYSAAEGKGVYTKKELLRQIAVSLGGRAAELAYYGEEEGLSTGPSSDLETATAIARKMICNYGMYHEIAAGIVMQNEVSETVSQSIEQKVNAIIQEQLNLSVAIIKENADKMAQLVDTLMEKTHLNKQEIQEVLNDMHYLPPIACHHKLPAASFFYYLPREKSTVHTLYDGFYAIPIPQWLILLMVFALCFGLSACGGGGSDNNDTVENEDDRCSDGSESDIYDSTDTVQYMASMESDNDNPAKQLGYSSIEEMRIQEHEIIASDDSDNTVAEGYWYPDGNRNSLTYIKIQRDTLYWYEFNPEQGDVQVGEADGIVFKLGSKRRLKSGKTLTYTDTSKLNFEECKICFEDDAMEYYWRERMKKWKKYGAFMFAMVMCLSFAACGSSDSIAASSEETENAEGDSEELVTDAASLDGMWSINGGTKLYFDSEGGYYIYRSYYGVGGRGEMSESPEDGKPMMTFNGFMYDFVLRSDGVLMPNQNDDGDGLNIHRNTFKRDDTAKLAEWEANNWDGMWQNAVGETIVIDTANMIYTASSPDYSMDGTLGDEGEGMGLYLYDNEDRAYLCASEDGNSFTLSGQYPGRYSDDGHFDGVFYRDGDIAAYTDLEKAKFYYGNGSDTWLWYNDGVNEYFLGDEYKIGDDGLAYYEADNKVYPGGWIPDEPYDPSVDWGENAQEETSINLENDFSHFEGIWYYDGDLSAETYIVMDASGNWSYYQRAPGAEPAEMDCGTLTQDADAANIYYAESTMYDGVSHQVFAGDGDVFLWDEEGNYYLMEMTFGMAAVLLILIIAGIILAVRGLQQRKILCIIIIVLLSVFGLALAVYMGLTMLFVDAVRSQSPVMKKNGIMLLVALLVLTLFTGCEGKSLHPKAESGSQTEGEQQIQAEMQSESGNQVESEYPTETKEQLDEEEQEKHEVKAKVEKAIGESFDDDAWRYVDASESHEGYLNRGLGGYLVECYRDGDKIYVLYNPDSGMHQYDNDVCYSTDGGMNWNYTHLHGLAGTAMYFVNDTIIMADGYVYDVPCNGVQREHNKKLNNGLPILHKVPPKRDYGRYFCIMAEKGGTSHGGLTEKLSPFFHAKKQEVNAYGRMADDKTTKTPEQPVTDTGSGKETPPTPPKEPEKVSVSPEPEKKTEPEVKNPQVSVYNFAEIMKEKKAEERAAAPGGEKPDPAKAEKPEKQPEVPKKAEEKPKEPEQPKRRGRPPKADKDKAAAPKPKAPAQKPGNAVKKEPEKKAAPPVQAAPAPKEPDKPKDAPRRDKEQIVYIKLNELHAFKNHPFEVRDDEEMRAMVSSVKDKGVTQPAIVRPREDGGYEIVSGHRRQKASELAGYADMPCIVRNLTDDEAITQMVEDNLNQREEILPSERAKALKMQLEAIKHQGSRTSGQIDPKDAGKRSNEIVAERNKMAVKQVQRYIRLNELVPDLMKLMDEKKLGFTTAVELSYVSKKNQNYIAVTIDSQQSSPSQAQAKRMRELDEKKLLNGDVIDGIMMEDKKEVDKVILTGAELSKYFGKETTPREMKDQIIKLLDDWKGQQKEHEKPEKKTEQEKMRRSGTLKVVSLVEPPFLFWFREKQEFAQPLRPFPREGERLWRIYIPVAMKRPLAYLTAAWSGEPDVDMELAAHYCRLAYEAGFSPICPLLYLPLFLNDSVPEEHKAGIDMRRDMLRRSHTLIVCGSVVDEDVKNDIAVAGRLGIAATTLEGVLAVKGHGTPGHAGHMAHLGDITKVDGGKIPPVHVITFGSPCQNLSLIGNRSGLAGAKSSLFYQAFRIIQEMRDATDNLYPAIAVWENVMGAFSTNDRMDFRAVLSAFSDTEVPMPPSGRWGNAGMVRGGTPDVCWRLMDAQYWAGSRRLARRQRIFVVADFGGRRATDILFKPRPMLPLPPPCGEGGRTAAEGDRTASFETGRQIPVIHPFQCFRMRGAAKRQEETAFRNSFGLPTDPFPTLLASDVTPFAFWYEGDPKGGCIRFLTETESERLMGLPEGWTKYGADGVEIRSLQRYKALGNAIALPCADYIMAGIYEVLADRAGKEEMFEAYITNTALYPLMGIEVGTTVHFPMTTQELQAALAKIGIDGKRYSEVFFTSFDSDVLGLYDHLYECENIDELNKLGHALLEVRDKGGLETFEAALVLGNHTRSVKDLINLTQNLDLYRFYPDISDDEGLGRLYADELGTIEIPEHIQNYFDYEAYGRDVRINEGGVFAPGGYVSAVPEGFKEYYHGSQDIPPEHRIFTYPEKAEPVHSILAALKRFQEAPPAPKKDKAGPSHEERMARSMKEVHTINYYPINEGAARRAKEMNSFSDYKEGSATAEYRAMVDKAAAIAEKQKSRVDPMYHEKIDHLLDTYARKLAENMNQGFAIDARVPSVLIAGPSNFPVGKKEKQNRARDSNIEEWRHIQGLLDKIRSTGMGGISADDPAAIEKLQKKLDGLERSQLIMKEVNAYYRKHGKLDGCALLSPDQIEKLKASMASNWRSDPRPFESYQLTNNNAEIRRVKARIEQLSKQAQQEFSGWEFDGGRVEMNREDNRLQVFFDGKPDADTRAELKSSGFRWAPSVGAWQRQLTDNAIRAADRLECIKPLSGEKPSQLQKKPSILQTMREQGKKVQTEPEKKAPSGRDAERMQEEVNQKTVALSIRTTKLTGKVLAAALGKVARAVQKHHRKALTPQGRQSVKKLMNHYGGKSAMPYVGAPKDFDRIAKEFHVDYAFHKVSPGHYLLFFKANQADVITAAFQKYSAKVLNKEQDKASILGQLRKFTEQIRTQAKEKQRTREAVKDGRMSDKIRKYVLPNLPYLFVFWFFSKIGTAYRIAPGTDFGTKLVGMLDTFPKAFETYWPGLGGIDLLVGLAGAAGVYLLIQSKIRQAKKFRRDAEYGTARFGTKEDIKPFVDPKFQNNVILTGTEFLTMNTRPKIPANARNLNACVIGSSGSGKTRFWLTPQLLQAHSSYVVVDPKGGTLDQCGRFLQREKYRVRVFNSIDFSKSMHYNPLAYIKTESDVLKFVTALIANTKGDGKEGDEFWTSATRSQTVKSLRTSNGFPLFGELVVYLGVTGQKSASGSNVEQASGGTRWQVIPDGKGSYYLVPECSGTAAMDLTNGTVANGTNIRIWNYNLTEGQRWSLVKMSDTYYKPLKIAENIYHIYEPGNVNTTLIIGEEKALLIDTGYGFGDLAAFVRTLTDKPLEVVLTHGHTDHCGGNYEFPTVYMNLMDVPTYLWYEATQKTLIVEKFKRDRSAAGLPPVWPDDFDEKAWEQQHTRHFESLKNGQIFDLGGREEEIIFMPGHTKGSIVVFDHETGLLFSGDNISDSLWILFDTSAPLAEYVGHLMDIKLLPLTGIVASHRDIIFPVTIINDLLRTISCINPQTDRGFVHPRTGQKALKHREPCEAIENIQYIYVVYDENKLQMVKHLRDSWCSAGAFYVYKHLLQNMERASIRIVSFQNGGCYMKNVKAKTNEQIAMQVSANSIAVNLMLSIFKLIAGLMASSGAMISDAIHSASDVFSTIIVIIGVKISGKASDEDHPYGHDRFECVASIILAILLGVTGVGIGLTGVQKLTAGHYDTLAVPGVLALAAAVISIVVKEIMYWYTRNAAKKINSGALMADAWHHRSDALSSVGSFVGIFGARMGFPMLDPLASVVICLFVVKAAVDIFRDAISKMTDKSCDQETVNEMHDCIMNIQGVEGIDLLKTRSFGSKYYVDIEIKADGDKKLWEAHAIAENVHHAIEQQFPLVKHCMVHVNPAMKKFICTALTLAMVVGSLAGCGSSSSKETTAASGAATEAATEAAQTEAAAATGDFDTSKEISVNSREDGSGTRGAFIELFGVEEKAADGTKVDNTTVEANITNSTSVMMTSVAGDPYAIGYISLGSLNDTVKAVKIDGAEATTDNVANGTYKVARPFNIVTKDGLSDVAKDFVDYIMSAEGQDIIEQNGYIKIDQNAAAYAGSKPEGKIVVAGSSSVSPVMEKLKEAYLAVNTNADIEIQTSDSTTGVTSTQEGICDIGMASRDLKDTETGVTATTIAQDGIAVIVNNENPVENLTSDQVKSIFTGETTVWADVQMKVKEKVMEIVFLVAACVSILAVLLICVFLFSSGIPAIGKIGPLNFLGGTVWKPSNNLFGILPMILGSIYVTAGAIIIGVPIGIFMAVFMARFCPGSLYKILKPAVELLAGIPSIVYGFFGMEVLVPLLRNTFAAFNCKGNSMLAASILLGIMILPTIIGVSESAIRAVPNSYYEGSLALGADHERSVFFAVLPAAKSGILAGVVLGIGRAIGETMAVIMVAGNQPAMAHSIFKGVRTMTANVVIEMGYATGIHREALIATGVVLFVFILLINLLFSVIKRREKMSEVDGVKAINKVTFGQRLKAYKRSKLSFLLAVLVLLSAIITIGVLGYLIFYILIKGVPNLSPDLFSLTYTSENVSMIPAIINTLIMTILALLIAVPLGIFSAIYMVEYAKKGNKLVGVVSVTTETLAGIPSIVYGLFGMLFFVTYCHWKYSILAGAFTLSIMILPSIMRTTQEALLSVPDSFREGSYGLGAGKLRTVFRIVLPSAIPGILAGIILAIGRIVGETAALIFTAGTVPDIAKNLMSSGRTLAVHMYVLSGEGLHTDQAYATAVVLLVVVIIINGLSTLIAKKFTKAMDKFNVEHLDLYYGDFKALKDINLKLPANEITAFIGPSGCGKSTFLKSLNRMNDLVEGCKITGKVTLDGEDIYGSNMDVNVLRKKVGMVFQKPNPFPMSVYDNITYGPRTHGIHKKSQLDEIVERSLRGAAIWDELKDRLNKSALGLSGGQQQRLCIARALAVQPDVILMDEPTSALDPISTSKIEDLVLELKKDYTIIMVTHNMQQATRVSDRTVFFLLGEVIEDGKTEELFSMPRDKRTEDYITGRFGMRNRFDLQLKQLNDDIIEMGNMIERAIEMGVYALIGHDTDKAKQTIDYDMDIDHMERDIEALCMKLLLQQQPVARDLRQISSALKMITDMERIGDQASDIAELSLQLGDVSDIDEISLIQKMANETMMMVVRGTEAYVTKDLDVAHNVIDNDDVVDDLFDQIKMALVKRIQDNHVKSFEAADLLMVAKYFERIGDHATNIAEWVIYSITGKHVDEADNMMMKRMWYELNILALRKHVRPVSLFLLVHTLLWCDLTWLICQIGCDILEIPKALYQMNILLITAYAGVFGGLIGGMIYLMHENLTMQNVIIILTLKSTVPVCDTADAVGCVQNITGTRNAFIPATYIQHSIDSLYILPDGYNEMKKFISAICVIALMMPSTLSAFADAGTADNLSGQQAVVVDVADSTEDAAETGTETVVETESASVVSTEKASDTKATSDTSKASETETMDETEDEPEVDPQYADDPQYWKEMKKQYGVATMSAVPSGYIHDSRFNKGYKIHYGVDVSSYQSNIDWAKAKADGVEFAIIRAGYRGWGTGRIVADEDIIKNIKGAKAQGIKVGVYIFSQAITEKEAREEVDKTIEFIGGQQIDLPMVLDYEYAESYNQLTGRLYKANLSRQAATDVCLAFCEYASQKGYEPMVYANKDMLTNKLDADAISSKYSIWLANYTTQTSYSGDYDFWQYSIVPVDGISDSTDGDFWYEKVTNDISIRNSNKPGNINQGASFSIRGQLLSTAEMSSVTVGVYDIDGKQVIGKTVNPNSKEYDIADIDSSIEFSKLPVGAYRYKIMATAGQTKTLVNSAFMVLSNGRTVADGTYYIESMKNNGYGLNVSGNSSASGANVVLGAKSSSNYMKYVFSYQSNGYYKIKNAASGQYLGVTGQKSASGSNVEQASGGTRWQVIPDGKGSYYLVPECSGTAALDLANGTVANGTNIRIWNYNLTEGQRWKLESTTTYMNPRISFDGLNWWISVCVEFPDCKETLNDDGVGIDLGIKDLAVCSDAVKYKNINKSQKVKKLEELRKEFTKLRHSDEYAWLLNISNNVTKQAIKDACTAYKNFFKGLQKFPRFKSRKRSMPKFYQDNVKIQFSNTHVKLEGFSSSRKANKQKKNWVRLAEHGRIPTDVKYMNPRISFDGLNWWISVCVEFPDCKEMSMSKTIFRELLDKEASPALGCTEPMMFALAGAIMKKIAVLGTGNIAQTVAVDLKSNGHEVRLFAPDYLISRIQKIVDTHEIECVGVFEAKEKIDVVTSDIDKAVKGADYIILCVPGNRHEEYARILKGHTTAQQILITFNGCMVSLIYKNVWEEDASCPIFAESTIPPFSARRVEPGKVRMFERHLAPIAFFPASAGEKYYDQVRKDIYEFPGMYADILECGLSLINPTVHPGPCLVNLSNIEKPDFTFFLYEHGFQPSGLKIDVLLNEERLAIGKALGYQIHALEDFAGVEKIESWEALYAMGHGCHALTSIAGPNDIHYRYLTEDIPIALVCWASIADLLGIETPIMDAVITLVGVAHDTNWFVNGRSAEVLGICGKSVEQIKNYVKTGNFMGNKKIGLGLMLNLIGAMFAYLIGSGFASGQETMQYFSGWGSVWTSLGVAVIALLLSCLAYIAYSYAGRTRGLKDLAGIYDFYAGNVFGKLFQVFAWLFNACCYMFMISGFGNVFHQQWGISIPIGSAIGVVLSVTIAVMGLNKIIDIIGKVGPIIVLFTLFIGIVAAFKYYPMIVEGNAAINSGDVDVIHAGSNWVTAGLSFGGCNLLLVSAFVGTIGYNLREYKFIYNQLIMIISSGGIMLVSFLMGLNHIGNIQAAVQASIPNLLLANSVFGGNAGIILSLLFAIIILAAIFSTICPMLWTCASMLAKDDKSKKYKLICVIAGICVYIITLFVPYETLLNYIMTYCGYSGCVVAVVCIVRYFIIKSRDKKEGLFKESVMESYLELGERLKEIRGNMGLSLEQVSALTGVSKTMLSQIESSKSIPTIATVFKIANGLKIKVDSLLCGEKKQYYDVININNLSPAIDNHEQVYMYCIFPFSPTTGFEIYYCIYKSGCDHESVTHKNAKMEYITVFQGELEMVVENRSYIVKSGEAIKFDATLHHKYINKGETDVIAQVILSYMYSEKTEENSTQNNNDRWQKKYICQLLGEYDIETMEDIMNENKKQFIALLLLADEQENMFNHYLEIEYGKKSIGKPRYHFEQLKIKMTFQLVCIEPKELTQYKSDMQEAFQKGFEDVFGKTDAVILPEKDIDQSLNAEGSAVYKAVVDGEMVGGAVVIINESTQHNHLDLLFVKNGVQSNGIGKKIWFELERIYPNTKVWETCTPYFDKRNIHFYVNVCGFHITEFFNEKHPMPDTPDDFVGDGNEGMFAFKKQMRLMWDKLYNAAVKVQNSRKISPFIDAGGVAAAILTKQGNIYVGVCIDTACTLGMCAERNAIANMITNGESRIDKVVAVMPDGMTDIKYISTKEAAGIMGLSTRRVVGLCNAGKLEGALRKGRNWKVPEETAYAYIGTEKSKAGNGEILSCAVGNTSYMDVVKNSYYVDKTLLIRDLIDDQVPVILFTRPRRFGKTLALDMLKTFFEKTKEDTSIYFKDKQIWSCGEKYQKMQGAFPVISITFKDAKFSDWASTYAAIKNVIRDEFMRHNELFTSDRLNPVEQDYLSRMQTDELSDVEYTRSLLNLGRMLEKHHQSKIVILIDEYDTPIQQGHSRNFYNEVITFMRNFMSGGLKDNPSLAFGVLTGILRVSKENLFSGLNNPIVNSVLDEKYSKYFGFTVDEVNTMAAYYGQETKLEELREWYDGYRFGSTEIYNPWSVANYFYNNCQAKPYWTNTSDNEIIREIMISLTPDIAENLFALLQGQTVQASLNMDVIYPRITDGTDTIFSFLLLAGYLKPVSDAVETEFGTFMELALPNKEIRRVYNTEILSWLKGTVDGNVMAGLEKALYLNDGKKLQEFLRKYMITCISCFDGAAEGFYHGMMLGLAAGMSSRYYIRSNRESGEGRFDLVLEPKVHSLPGVIMEFKATKNDAGLSASADEALKQIEDKHYDTDMKDRGIKEIVKYGIAFAGKNVEIAKGMKSVIVYASVHHGNTKKLVEKIAEECKKPDIHSETQRENNGNLTEIHCMQLNVYKKNMRAVVFYQHCGFKIVNKETDENTSEEEYTMEWHRMIRRFETRDLDEIMDLWLHVNIESHSFIEADYWKKNYDMVRKLIPEAKVFVAEENEEILGFIGLTDTYIAGIFVKETEQSKGIGTELLRTVMNLYDQLQLNVYKKNMRAVVFYQHCGFKCNMASERTDELYKVLLDRGYPKEFCAEIAYKNMNTDYTATRMLGYLYRVSDPRIEDLVDEMLAILSDRDAIIQKKEMEHAQAVINEIYRNGLMPDHIHMLVSIPPKISVLSFMGYLKGKSALMIFDRHANLKYKFGNRHFLAEGYYVSTVGLNEATIKKYIQEQEMHDIAMDKLSVKEYEDPFKGMAKKENSLAHTKWMCKYHIVFTPKYRRKAIYNQYKADIRDNIKMAAVSDGAIVGSAIVRLCEKYGREAAGPIGEYVRSMKVAVLQKDMAIIDLTKENFQAEITKSDKPVLVDFWAVWCGPCQMMAPILHELEAEMPDVQIGKVNVDEQMDLARQFRVVSIPTLIIFKNGQEVQRMVGVTSKEELKDALKMNQTNVSNELAAAPVGKLLFKLAVPTVIAQLVNLLYNIVDRIYIGHMPGTGSSALTGIGLCFPIIYLISAFSALIGQGGAPRAAICMGQNKTTEANRILNNCFVVLIIEAVILSVFFWIFGEPLLWLFGCSEQTIVYALPYMQIYVSGSIFVMLALGLNLFITTQGFTRFSMTSVLIGAGANIILDPIFIYGLHMGVRGAALATIISQGLSCIWILRFLTGKKTRLRLKKSDMHLEKRIVIPCLGLGLGPFVMQATDALLNIAFNSSLQHYGGDIAVGCMTISSTIQQMVWIPVQGIGQGAQPIISYNYGAGNAKRIRQTFKCMLAVSMTALTVFWLFVQLSPTTFIRIFSNSEEIIATAGWTLRVYMAVFCMFSIQMSVQQTFTALGKAKASLFIACLRKIILLIPLIFILPHFFDNKVFAVFLAEPVSDTISITASIITFRIVFKKAMQSISKSAMYCDFEEYVKNRKPDKLSLKNLVDPSLEKPYDKDELALLSHLAVIYSESITPASEDENPEAEADDDDDDDDFMHDYLRAVGFSKVQHKRDLQRLLDMVMGSPDSEFASDCGGTVYAEKCRDFVSNAGITVRGEVDEHGMFSYEYYFPHYTGHQISLTDDVSVEKISEREEYDGMCDVVNLGVSLIFHMNHLMDYADMNPKSRQISSVSVRLSALSISGKVILPVVRNDSERLKRLRENESRNGMIAAARQGDQDALENLTLEDIDMYTSISKRIKSEDVLTIVESYFMPYGIACDQYSVMGDILSVEEVYNQLTGEKLYQIQIECNDVLIDLCMNAEDLLGEPAVGRRFRGNIWLQGHLDYVMLDKNEWIRPWAGSDDEVTKMLDIKLIRENPDKIKAGLKAKEVDCDELIDRILELDEQRRTLLQQTEALKAEQNKVSKQIPALKKAGEDTTAIFKEMGEIKGKISALDGQLRDVVNEYQQDLYCLPNMPDDDLLPGGKENNEPLRYFGEPKKFDFEPKNHVDLCTNLGLIDYERGVKLAGNGFWIYKGMGARLEWALLNYFIDTHLADGYEMIMPPYMLEYQCGLTAGQFPKFADEVYKIANPTDEGRIHYMLPTAEAALASVYRDEILTEADLPKKFFSYTPCFRREAGSYRADERGMVRGHQFNKVEMFQYTLPEKSDEAFEELVTKAENLVKGLGFHFRTVKLAAGDCSASMARTYDIEISIPSMNGYKEVSSVSNARDYQARRGNMRVRRADRSIQFMHTLNGSGLATSRVLPALVEQNQLKDGSIVVPEVLRKYLGGIEIISKMFIVYAFMKKSMLIKKGQAEVLKKYFYNGIINARMTDFLYPDILNEQLTYARQARAAWLWTNVAERSRIFLQVLDTLQPICASLARDSVQETGYGIFEDRMLMITRLLRDLRSCCLQTESPFSERLSCTDTHTQSQPSGTLLGIPSSIHPVTETLFAAAIAIQTGNPLIFFFSDSAFQISARTASLVRDAAIAAGAPDNCIQWLEIADDNLLEKCNHCPDISGLILSGLSANIRKVFSAFSAECILSFPQPSFCYIHYSADPTLAAGQIVLSKTFDNGMCLNGEQIICADAVILPSLKDALRRTGGYFASPEEIVRLTAILANLSDNTVNPSVIGQSAQALADLAGIVIPEATRLIILEIEPDNASHPLLVPFLCPVLVLISVNDYEQAADKIRLLSTKSASFSTDFPFSDTRPLPTHHYLALYAADNAPISFLSYALPDFSIIENAPAASVSMIQQYMDIYGHLLPPSAIPQLFSIRRCHSTMIETARCFSFPAEIYYGQNPLEQLKLYEHEDHLLFLQCPAFSESAVQTVIKRIQQKYPFIQYECLKLAPDDSQITDFLCQHSLFPELPAAPDCLIVIGDSTAVHIAKMLMTRYQQSASSSLPRLIIMTSDAGCHAALLPFYPHYDSCSNRLTDMSCQLSHFTLIADSHFSFFRSHKHLISACMAAMADAFDSLLFVGGDDISDAMAFRSIQLFLVWLPLFLSAPSERGHQKNRPDACLEHLQNACILSGLACSHTDLGLSHILSQQLCCEFRISMSALQALLIPRLLLYYGSDSTHLSGKAWTVSSSACSADNYLKMLAAINPSFDGNRRAADILAEKIDTLLDDAHLPTNIKSCHIREKDYLQRIEDLALRSFEQLSAICADTGSGYPLVSEIVRILKDIYMKQQVNIKKLDDRAIIPTYGTAFSAGADLYACMDHAVTIAPGETYLVHTGISAAIPEGYAGLIYARSGLATKKGLAPANKVGVIDADYRGEIMVALHNHSNQPAEIENGERIAQMVITPFLTAEFVETAELDETERGAGGFGSTGRIMNLNYADIKYCDVANGKGVRVSLFVSGCTHHCKGCFNEETWNFHYGKPFTEETEKQVLDYLDKSYIAGLSLLGGEPFEHVNQQGLLPLLRKVKARFPEKNIWCYTGYDFEKDILGRMAEQWEETKEMLSYIDVLVDGEFKEALKSPSLQFKGSSNQRIIEVQPSLKEGHIVLWEPKEYVHVEVRENMRSNKRNNKLSYFLTLLLCLCMLVGCGSGAATQVMLKAEDSETESYVETVQTESAENDPGDETEIQTAAETEIQAAAQVQSDDSKQKVVHTGTASAFNAADVPAYSGEPYTAVNNNEPYFISDNLTTEAFENYSELDALGRCGVAYANVCLETMPTEKRGSISEVKPTGWHSVKYDNVDGKSLYNRCHLIGYQLTAENANQQNLITGTRYLNVDGMLPFENMVADYVKETDNHVLYRVTPIFTGDNLVADGVLMEGYSVEDEGDGICFCVYAYNVQPGITIDYATGDSWLSSEKGNSNSSSGGNSAVSQSAADKSGTQQAAVQTESVKETSAPVSTGTEYILNTNTKKFHYPSCSSVKQMKASNKKEYTGSRDDLIAQGYDPCKKCNPMRVIVCVDDNGGMLFNHRRQSRDRVLCERVLQMADERDCSVYMNTYSAKIFPEDNRIAVSENYLEEAGVQDLCFVEKEPLATYFDKIDECIVFKWNRVYPADQHLDIDISKMAKVQEEEFVGFSHEKITMEVYERMFLLYFVVNLLFMFVDNMILFLIDERKVIMIVIKRDGQEVNYNRSKIIVAIGKANEEVPEEERISNQEIEEIVSYVETRKRKRILVEDIQDIIEQKLMALGKFDLAKRYIVYRYTRELVRRANTTDDSILSLIKNSNKEVMEENSNKNATAASTQRDLIAGEVSKDLTKRLLLPEKIAKAHEEGILHFHDADYFVQPIFNCCLINIQDMLDNGTVMNGKLIESPKSFQVACTVMTQIISAVASSQYGGQSVDLKHLGKYLRKSHDKYEKAYRAHFGDEFDDDTIEKLVQDRLKDELKSGVQTIQYQINTLMTTNGQSPFVTLFLNLDENNEYIEENAMIVEEILRQRLEGIKNEKGVYVTPAFPKLIYVLDENNCLKGGKYDYITKLAVKCSAKRMYPDYISAKKMRENYEGNVFSCMGCRSFLSPWKDENGNYKFEGRFNQGVVSINLPQIGILAKGNEEVFWKLMDERLQLCFEALMCRHNALKGTLSDVSPIHWQYGAIARLNKGEKIDPLLYGGYSTMSLGYIGLYEVTKLMKGVSHTDPVGEEFALRVMNHMKEAADRWRDETNIGFSLYGTPAESLCYRFARIDLEKFGEIKDITDKGYYTNSYHVDVREKIDAFSKFSFESQFQKISSGGSISYVEIPNMRHNLEALEEVVKFIYDNIQYAEFNTKSDYCHVCGYDGEIKINDDLEWECPQCGNKDHSKMNVTRRTCGYLGENFWNVGKTKEINARVMHLEISHSKEVRPLEDDEVDRAEVEGQDNMFTSVNEQVGTIAGQVGQTPQGWNAGIFNLIQNISQTVIVPIAGLIITFVLCYELITMVTQKNNFHEFETYNIFLWIFKAYVAIYLVTNTFNITMAVFDVGQHVVNNAAGVISGNTAVDATEAISRIVDALEDMELGDLFLLSMETMLISVTMHILSIIITVILYGRMIEIYLYTSIAPIPFATMTNKEWGNIGNNYLKGLFALAFQGFFMMVCVGIMKKQIGKNLMQKWKNKIRVRLSALDKKKLVLTNIPYILTAFYTNRASFLYRNSLGEDIGNKLLYAMEHADRILTGLQPSFNWRDMLTGIVAAVILKLLVWQKQSDAKKLRKGIEYGSARWGNAEDIKPYMSEDPWMNIPLTATEALTMESRPKQPKYARNKNIVVIGGSGSGKTRFFVKPSVMQMNCSMVITDPKGTLIEECGKMLAKGPPKKDKNGNIMKDKSGKVVHEPYVIKVLNTINFSKSLHYNPFAYIRSEKDILKLVTTIIVNTKGEGEKASEDFWVSATRSQTVKSLRTSNGFPLFGELVVMQEEVTQKTVTFCIRTTKVTADLLKKVLAAYLRHQKQKSVEKKAKKNQPKQGKVTVKELAKQNAGMVNIEITNKNIKSFERYARKYGINYALKKDKSKDPPMYLVFFKGRDQDALNAAFREFSQKQIQKANKPSIHKRLATYRAMMPKKSKDKVKNRHQEQSRMEKRMEKTDYKITEFHNSEFGSIRMIEDGGRLLFSGIDVAFALGYAKPRNAINVHCKGALKRGVLTSGGVQPMIFIPEGDVYRLITKSRLKSAQNFEKWVFDEVLPAIRKTGGYLETDLLDRVKDNPELLLEFAERLLAENNRNRELQNRVKDMQPKADYYDHFMITGECTNIRTTAKEIEFPERKFVKLLLNRGFLYRSPSGTLLPYAVEKNNDLFIVKDYFNNGHLGSQTLVTPKGKEFFKALCAEEEMRKYFLELFAIGLVDSEGRINTEHMTSDALMTAMKTMEELTQMKMDRLVLETTMEMILCMFESCDTEEFTEILGKLLGGKQTSKVTAHLEALEELLTEEEYSSFLAEYLGYLTVNVAEFIRSTIIENGLMLLAGSGGEEDGEEDGEDGLMNTIVLMGRLARDPETKLTSTQKGQTKVSRFPLVVKRNRTSKAFVVMITAYGNNAEFVEKYLEKGIKIALSGELVISQIKDEQTGTASYYTEVIMDNVEFAEAKTKKEESDGFQPAEKRKIPFDIPEELEQEMPFRMRNMLTGDNPARAGEDSYGKSEAIMIPPKGTGPLLKQRLMYQLLQLSRCNRKNCLNLFYVCDFWKSEDFQFAFHILCIGSDKIGHDFRNFLKLFFEVMKAHEYWSVGALITMLGTFYSGYKGSKSSHKYFAASSLLCMIMAIYTGHKMISKNKKTKKEPISLGNEEMKIVIINGSARKGNTLTAINAFIKGASEKNEIEIIEPDKLNIAPCKGCGVCQCSKGCVDKDDTNPTIDKIAAADMILFATPVYWWGMSAQLKLIIDKCYCRGLQLKNKKVGTIVVGGSPVDSIQYELIDKQFDCMAKYLSWDMLFKKSYYATARDELEKNKDSMNELEGIGKNLMEELYKVMDDLLEVEFQMKAGMDILKELEEFYMLEKETEKSDARKVAVLMKGYLQSMKSNIREIIRYIDDTTLEKSNDKKKDKQESASTISEEVQEFVNLTITEHMGKAYSEWKLKQDKEPVSEIDKKYQKLLETLSQEQEEVITEYCNAIFSSGAETEEFFYRLGLKDGLNLKNTVKSVLEMISMLRFMIKLPFRIIAAPVWLVLAAVNIVLVFLVGLSAGFCYLIAGISVVTEVLSIGFGISTDWTMKSAIITTVVFVLLPHIGMGIVAVIEVVKCGLQEFIFGMSIRATFHYFQGMECDMYSFYRIPKLLFTSEYFKNLSCEAKVLYGLMLDRMSLSIKNRWFDEEDRAYIFFSVEEIMEMLNCGRNKAVNCLKELDQEKGIGLIEKRRIGLGKTNVIYVKNFSLTEYPDEPAIFDSEETPENVAERKENTETEIEEYAKKEPEKPVNTQKFEKQTSGSLKNKLQEVSKTNFKEFEKQTSRSLENKLQEVSKTNCNNTEYNYTEFSENESYQYLSEQEKGRDRIQERNEYRQLIHDNIEYEILCQSYGTGRVEELVELMLDAICSTKTYQQINGEAVPTQVVKSRLLKVGYEHIQYVFFSLDRSTSKVKNIRQYMLTVLYNAPATINQFYDAEVRHDMYWGKDIPDRMKGRSASKIKLTSYDELLGGGEETNDIQQVSLEHLHSFENHPFQVNDDEAMAELVESVKEEGILTALLVRPLGDGEYEIIAGHRRRHAAQLAGLKEVPVIIRNMDQDTAVRAMVDSNLQRPNILPSEKAFAYRMKMEAMNHQGTSGGISAKDIGKNANDSARQVYRYIRLTYLMNDLLNAVDRDVIGLQVGVELSYLTVPEQEMVEEVHESTGKYPSLEQAKKIRQHREEKTLTKEIVRLLVIGERKKKTTVTLKQDEIKKYFPPEYDEQKIRTVICQLLEEWSNQNHMEEKVMKDCKVLALCSQKGGVGKTTSCVNLAVGLAKAGKKVLVIDNDPQGSMTASLGYHNPDELPITLATILTKIVEDELFENTLGILHHQEGIDLIPANIELSGMEVSLVNIMSRELVLKQYIERMREEYDYILIDCMPSLGMLTINALASVDAVIIPVQAAYLPVKGLEQLIRTIGKVRRQLNKQLKIGGILITMVDNRTNYARDISDLIFDTYGNQIKIFPQSIPFSVRAAEISAEGISIFEHDPKGKVAAAYWQMTQEVLLDERMAGDRHGKHNTTTISFRVNSYEKATIEERVKVSGMKKQDYIVRSCIYNHVCVVGKKETIEIIRSEMKEMSLVLEDVAKDLKSEKPVISEPVLDSMTERYLAFLEAALWMLKGSSYLWEDKKDGRESNEGLMGVYKEGKNWKVQVYYKDWQGNRKRKQKRGFRTKGEAKEWERDFLQQQSQGVDIEFGNFLEIYYKDMDVRLRENTMYTKRYIIDLKIKPYFEKKILSEITVADVRAWQNELLTYKDKNGKGYSPTYLKTVNCQLTAIFNYAMRYYNLQDNPCRKAGAIGKSKGEPKDFWMQEEFNAFLETVSDKPETRMAFLLLYWTGMRIGELLALTYNDINLEEKTISINKSYQRLKGKDMITQPKTPKSIRVITMPDFLAEEFREYCSHLYGIMKKERLFRFTKSHMEHCMATGIERSGVKRIRLHDLRHSHASMLVDMGVAPLEIAERLGHEKVETTLNTYSHLYPSTQSKLAGLLDKKHEEEEEMSMMQEKMYMDVDDVCAILGVSKTYAYSLMREYNKELKAKGYIVVAGKISTKFLAEKIYGMKVEDMRKRKMYLSVEDIAELFGLSVSFAYRVVERMNADLASKNYYVILGRVPTRYVEDKIYGLEHVEQYLKEDKAVMQNKLFLKAADICELLEVKQTSAYEIIGNLNKELEEQGYLTLRGKVPTKYFVKRFYGVEDTCEIPQEEGKEWFHAMAKEMVIVLDFGGQYNQLIARRVRECNVYCEVLPYTKTLDEIKALNPKGIIFTGGPNSVYDETSPHYEKAIFELGIPILGICYGSQLMAYTLGGEVATAPVSEYGHTDVEVDTTSVLFHDVADTTVCWMSHTDYIKEVPEGFRITAHTPVCPVAAMECAEKKLYATQFHPEVMHTKEGMKMLHNFVYDVCGCVGDWKMDSFVETTIKSLREKIGDGKVLCALSGGVDSSVAAVLLSKAIGKQLTCVFVDHGLLRKNEGDEVEAVFGPDGPYELNFIRVNAQQRYYDKLKGVTEPEAKRKIIGEEFIRVFEEEAKKIGSVDFLVQGTIYPDVIESGLGKSAVIKSHHNVGGLPDVVDFKEIIEPLRMLFKDEVRKAGLELGIPEYLVYRQPFPGPGLGIRIIGEVTEEKVKIVQEADYIYREEIAKAGIDKGLGQYFAALTNMRSVGVMGDFRTYDYAIALRAVNTSDFMTAEAAQLPWEVLAKVTNRIVNEVKGVNRVMYDCTGKPPATIEFEMKIINNIEIDNPNQWIERFVEQVLENAGIDCEQALIEEIEEEKRILLSAGGQRYDIRIQAFLPVAADLNGMVCTENVQYVLYRKNTENGREYGEAIDDDFIRIQRGNTAAYEEVQEKTLFSIAKLNSTPLWNLILQITLLSNVEFNSSYFYFIILYINMALPPSIKEALMNKHTHLNLDARILIETLLNQQHSFKSIARHLGKDCTTISKEVKSHICFEKSGTYGRSFNDCRLAFLHQCSIHKICQHCTSSHNRYCWTCGRCFSSCDSYEKYVCPKLSKPPYVCNGCPQRSKCSLKKQLYKAAFAQKEYEQVRSESRSGFALSEAELKQLDDVVSPLLKKGQSLHHIALHHADELMKSERTLYVYINSGLFTARNIDMPRTIRMRPRKNVSSNLKVDKSCRIGRDFQSFHKYMADHPDASVRQLDSVEGLKGGAVLLTIHFVEQQLQLAFLRRHNDSQSVIDIFERLYLELRSDVFIQLFPVLLADNGSEFSNPSAIELDAQKNQRTKMFYCDANAPYQKGSCENNHELIRRIIPKGTDIGRYTQEQINLMMSHINSYSRKKLGNKSPYEVFEFQYGKKILDAFHLQKIPADEIVLSPELLKMNIKKNYSKKRHQSYASAQAHAVINGLIGVIVIAFISFYFFLTPLNPQSIAFWLTLIIALFVFAALKSLTICSAAAGRMQDQAAGQKTWKDVCGHEGIFFILPLIAIIALLLIALSGSPVFSSHKYAAILNVEDAVFSDDLSESLGTDSIALMDTASARMLGDREIGSLSNVVSQFNVSDDYTQIDYNGKPAKVAALDYAGFFKWIGNKSDGVPGYVTVNPVSMSASYVQCSQPMTYVPSAYFHEDAARYIRFHYPTLLLGNLHFEIDEQGQPYYVMSVYKNTISLFGGQTVTGAITLNPSTGELTHYALSVVPNWVDVVVDGDLLCRQYNWSGTLKNGFMNSLIGKKGCKRVTTYEADEDDENDDVPVSDYGYVSKNGDIWIYTGVTSVNGDRSNIGFLLANERTGEAHYYSIAGADEKSAMAAAEGEVQEKGYQASFPSLINVEGHPTYIMVLKDASGLVKLYAAVNVEQYNIVTTASSQTECLNRYKQLLGIESGSADNNNNQPDNSTGTDNDASNSVTGSSDISEPTVADAETNLTITDIKYIDINGNTYIYLISENDTLYRAKAASHEDMLLLKKGDNVHIAYSGKDIVTCEKQNMHRIKLTVAYDGTNYCGWQVQPNGVSIQSTLQKAIENLLGVKTDVTGASRTDSGVHALGQVAVFDTDKNIPDWKYALAINQRLPKDIVVQKSEEVPLDFHPRYTDVEKTYEYRILNRRTQLPKERLYSYFVPKKLNVDKMREAGVYLVGEHDFKSFCSQKTKVLSTVRTIYSLELIEEGDIVTLRVSGNGFLYNMVRIIAGVLIKVGLEQKEPEEVREAVEHPMGKAAGPTAPAHGLTLVEIKYLSNMIRDITIGQYYPQSSVIHRLDPRVKLLGTVLFVISVFLIHSVPAFIIVTAAMVALIALSKVPVSFMLKGLKSIFMIILLTFCFSLFLTPGDSLFKIGFLNATVQGLKTGLYMVMRLSYLIIGSSLMTLTTTPNQLTDGLEKGLGCLNRVHVPVHEVAMMMSIALRFIPILLEEMDRIMKAQQARGADFESGNLIQRAKGLVPLLVPLFIAAIRRANDLAMAMEARCYHGGQGRTKMKPLHYEKRDRMAYLLMAVYMIAICVLRGVMMSQIRFENVNYIYSGGTTFEKQALKDVSFAVESGSFIGVIGHTGSGKSTLIQHMNGLIRPTSGKIYFHDEDITADGYKKKELRSKVGIVFQYPEYQLFEIDVLTDVAFGPKNLGLSQEESRKRAIDALQLVGIKEEQYTLSPFELSGGQKRRVAIAGVLAMQPEVLILDEPAAGLDPGSRKEILDTIVHLYRETGMTVILSSHSMEDMAEYAERLLVMNQGELVMDGLPHEIFGRYKELEKMGLSAPKMTYLMHSLAGKGYDLSTDILTVSDAAEEILNLWRKTRMEDGEKMEKIIRALHLIHDYVQKDENGNIESKNRVLRDISVDIEAGSFVVLLGHNGSGKSTLARHLNALLQPTEGTVWINGHDTKEQREWLEIRKTAGMVFQNPDNQIIASVVEEDVAFGPENMGVPTEEIWQRVAKSLESVDMTAYRYHSPNKLSGGQKQRIAIAGIMAMRPSCMVLDEATAMLDPSGRREVLEAVHRLNKEEKVTVILITHHMDEAVDADRVLVMDQGQIAMDGTPKEVFSRVEELQKLELDVPQITELAWQLKQQGMPFSDGILTQEQFIHELEQILQPGGKGTEHVADSIMAGYRKLGRTSSQRKALLRNQVTDLLCYGKIKTTEAKAKEIRKIAEGLIALGVKEKDNFDEVTVQAKVVRKDANGKRVKEDGKVVFDTVEKTIKKDRPSRLHARKQMAKVLYTRKDIPAAAAKRKANTKEINLQDKLFGELAEKYATRNGGYTRIVKIGERKGDAAMEVIIELVMFYFEKPKIEIAEISEDNKYGRFVVEPLERGYGITLGNSLRRIMLSSLPGAAVSHVKIDGVVHEFSAIPGVKEDVTEIIMNIKSLAIKNTSLTNEPKLAYIEYEGEGVVTAADIQVDQDIEIMNPDQVIATLSGGADCKLYMELTITKGRGYVSSDKNKSDDLPIGVLAVDSIYTPVERVNMTVENTRVGQVTDYDKLTLDVYTNGTLGPDEAVSLAAKVLSDHLNLFIDLSENAKTAEVMVEKEDNEKEKVLEMNIDELELSVRSYNCLKRAGINTVEELTNRTAEDMMKVRNLGRKSLEEVLAKLKELGLQLNPSDEMAREMVPVLKRCRSLGLDPLYLGVDKKSNRQSIRGNRKKSEYGNQLREKQKAKFIYGVLEKPFRNYFAKASQMKGQTGENLMVMLECRLDNIIFRLGFARTRKEARQIVDHKHVSVNGKLVNIPSYQVKPGDVVEIREKFKTSQRYKDILEMAGGRMVPEWLEADQENLKGEVKALPLREQIDVPVDEMLIVELYSKMAKKVTKKVTKKRVRKNVERGQAHIQSSFNNTIVTLTDTEGNALSWASAGGLGFRGSRKSTPYAAQMAAETAAKAALIHGLKSVEVMVKGPGSGREAAIRALQACGIEVTSIRDVTPVPHNGCRPPKRRRVMARISGVDLPRDKRIEIGLTYVYGIGRATSNRLLKEAGVNPDTRVRDLTDEEVGKIRDAIDADSILIEGDLRREIAINIKRLQEIGCYRGIRHRKGLPVRGQKTKTNARTRKGPKKTVANKKKMKVRSSVKPICEKCKVIKRKGSVRIICENPKHKQRQGMSKADVIEVEGVVVEKLPNAMFKVELENKHVVLAHISGKLRMNFIKILPGDKVTIELSPYDLTKGRIIWRDKMKKKALSDKYPIGQLVRSRQGRDQNRLYIVTAVGDRNLDAADGTKWTVSKPKRKNPLHLQKINIRMDAEITDADIVKIIQTFENRKENQEDKMAVTVKSEKQIALMREAGRLLAITHEELHKALKPGMTTLDIDRLGEEIIRDFGCVPNFKNYNGFPASICVSINDEVVHGIPTDKRVLKEGDIVSLDAGLIYKGYHSDAARTWGVGEISAEAQRLIDVTRESFFKGISFAKEGNHLHEISAAIQDYVEGNGFSVVRDLVGHGIGTHLHEDPEIPNFRTKGRGIRLMAGMTLAIEPMVNAGTWEVAYEDDDWTVVTDDGSLSAHYENTILVTKDGCEILTLRMKIIMLGAPGAGKGTQAKMIAEKCGIPHISTGDIFRANIKNGTELGAKAKEYMDKGLLVPDELVCDLVVDRIQQADCEKGYILDGFPRTIPQAEALENALNAIEQKLDYAIDIDVPDENIINRMSGRRACVGCGATYHVLFNPTKVEGKCDVCGESLILRDDDKPETVKKRLDVYHTQTQPLIDFYTERKVLVEVDGTQSMDKVFDDIMKILGEMANTNSNGASLKNILKVPEIQKRLLFTFLILVVVRFGAQIPIPGVSRDVFASWFGNQSNGAMDLFDMMTGGSFSQMSVFALSITPYITSSIIMQLMTIIIPSLEEMQKDQDGREKMKEYTFYLSIVLAAIQSLAMGIGFYRGGYLASKNALGLVIVVVALVTGACVLIYLGEEITKHGVGNGVSMILLFNIISRLPQDFKTLYDTFMSGKNIVKAGLALIIIVAVILFMFVFVVYLQDAYIKIPVQNSSKVQGRRSVGSVGDYIPFKVNSANVIPVIFAGSLMSLPSLVTTFAGKTPSGILGEIIKVLNQNNWFNMSAPVYSIGVIIYIVLVVAFAYFYTSITFNPVEVSERLKERGSFIPGHRPGKQTAEYLQSVSNSTIVIGAVGLLIVALVPIVFSGLFGADVSFGGTSLIIIVGVIIETIRQIDSKVEQRHLTGIFSKMNLSELKPAAGSTHSANFRVGRGHGSGNGKTAGKGHKGQKARSGAPRPGFEGGQMPLYRRLPKRGFTNRNTKDIVSINITELNRFEDGAVVTIETLVENGVIKNPKDGVKILGNGELTKKLTVKANAFSASAAEKIQALGGTTEVIMAEKLKITLVKSTIGAIPKHKKTVEALGLKKLNKTVELPDNAATRGMVAQVKHLVKVEEIMKRTIIDASQLELTEKVVSIKRVTKVVKGGRNMRFAALVVVGDGNGHVGAGLGKATEIPEAIRKGKEDAIKKLIEVPLDENLSITHDNLGKFGGASVLLKRAPQGTGIIAGGPARNVLELAGYKNIRTKSLGSNNKQNVVLATIEGLSNLVTPEEVAKKRGKSIEEILGMVNKQSRSEIRVKKHRRLRHHLVGTAQRPRLSVFRSNNHIYAQIIDDTVGNTLVAASTMEKAIKDELQYTDNVAAAAAVGTAVAKKALEKGITEVVFDRGGFIYQGKIQALADAAREAGLKFMSRIGRMPIAIPAGVTVEIAENNNVTVKGPKGTLVRALAPEMEIKIEDGHVVVTRPNDLKKMKSLHGLTRTLIHNMVVGVTEGYTKKLEVNGVGYRAQKQGKTLVLSLGYSHPVEMTDPEGVTTTLEGQNIIIVSGIDKEKVGQYAAEIRDKRRPEPYKGKGIKYADEVIRRKVGKTGKKMTDPIADMLTRIRNANTAKHDTVDVPASKIKTEIARILLDEGYIKAYEIVEDGVVKTIKITLKYGADKNQKVISGLKRISKPGLRVYAGVENMPKVLGGLGIAIISTNKGIVTDKEARAMNVGGEVLAFVWMAKTAMKIKQQRKPKFSTREYNRCRICGRPHAYLRKYGICRICFRELAYKGEIPGVKKASWMNRLQEKYNNEIVPAMIEKFGYKNIMQVPKLNKIVINMGVGEAKDNSKVLDSAVKDLEIIAGQKAVVTKAKKSIANFKIREGLPIGCKVTLRGEKMYDFADRLINLALPRVRDFRGVSANSFDGRGNYALGIKEQLIFPEIEYDKVDKVRGMDVIFVTTANTDEEARELIRLFGMPYVKMSATMRIKKGDMVQIIAGKDKGKSGKIIAINHKKGVVYVEGLNMITKHTKPSMANQQGGIIHTEGPIDASNVMYLYNGKPARIQYQIVDGKKVRAAKVKDQAAVVIDMIQQETRLRVADNTGAKELLCIRVMGGSTRRYANIGDVIVATVKDATPGGVVKKGDVVKAVVVRTVKGARRKDGSYIRFDENAAVIIKDDGNPRGTRIFGPVARELREKQFMKIVSLAPEVLMEERNLRKTRVGRVVSNKMDKTIVVAIEDRVKHPLYKKIVDRTYKLKAHDENNECNIGDRVKVMETRPLSKDKRWRLVEIVEKAKMKTNEYVKDLNTKSVDELAQALVEAKKELFNLRFQNATNQLENTSRIKEVRKNIARIQTVITEKANAAEMLMPKRVKRRKQFRGSMAGKAQRGNKISYGEYGIVAMEPAWIKSNQIEAARVAMTRYIKRGGKVWIKIFPDKPVTTKPAETRMGSGKGTLEYWVAVVKPGRVMFEIAGVPEEVAKEALRLATHKLPVKCKIVSRADLEGGDNSENMGQKVNPHGLRVGVIKDWNSRWYADADFADNLIEDHKIRTYLKKRLYSAGVSKIEIERASDRVKVIVYTAKPGVVIGRQGSEIEKVKAELKQFTNKKLLIDIKEVKLPECDAQLVAENIAAQLENRISFRRAMKSSMQKTMRSRGGVKGIKTSVSGRLGGADMARTEFYSEGTIPLQTLRADIDYGFAEANTTYGKVGVKTWIYHGEVLPVKGNKEGSDKMAKGHRSQIKRERNSNKDTRPSAKLSFARIPVQKACFVLDAIRGKDVETALAILAYNPRYASTVIDKLLKSAIANAENNNGMDRSKLFIEECYASNGPIMKRVQPRAQGRAYRIEKRMSHITIVLNERMARSLKKGPFADESLLKKVDAMNAAGDKSVIKTWSRRSTIFPQMVSHTIAVHDGRKHVPVYITEDMVGHKLGEFVATRTYRGHGKDEKKSRRMGIRTYNPYTPSRRHMTGSDFSEITKSTPEKSLTVSKNSKAGRNAQGKITVRHRGGGAKRKYRIIDFKRYKDGIPATVKSIEYDPNRTANIALICYADGQKAYIIAPNGLQVGAVLMNGPEAEIKLGNCLPLAQIPVGTMVHNVELHPGKGGQLVRSAGNAAQLMAKEGKYATLRLPSGEMRLVPIQARATVGQVGNIDHELINIGKAGRKRHMGIRPTVRGSVMNPNDHPHGGGEGRAPIGRSGPMTPWGKPALGYKTRKKNKHSNKMIVRRRDGSMIKMADLKYYDVILKPVITEKSMNAMADKKYTFLVHPDATKSQVKEAVEKMFAGTKVASVNTMNYDGKTKRRGMTFGKTAKTKKAIVKLTAESADIEIFEGLMAKLSVYNIEGNQVGEIELNDAVFGVEVNENLMHKAVVAQLAASRQGTQSAKTRSEVSGGGRKPWRQKGTGHARQGSTRSPQWTGGGVVFAPKPRDYSIKLNKKERRLAIKSALTTKVNESKLIVLDSFELDEIKTKKFVAVMNNLKAEKALVVLNEKNDNVIKSANNVPTVKTALTNTINVYDILKYDTLVLTQDAVATIQEVYAMKKAILTTKVGMTQVFSEDGVLTPVTVLQAGPCVVTQVKTVENDGYSAVQVGFGDIREKLVNKPKKGHFAKAGVTAKRFLKEFRLEDAESYTLGQEIKADVFAAGDKVDATAKSKGKGFQGAIKRHGQSRGPMAHGSKYHRHAGSNGSATTPGRVFKGKHMPGHMGAVRVTVQNLEVVSVDAEKNLILVKGAVPGPKKSLVMLKESVKAMASQVMRITLKAYDHKLIDQSAGKIIETVKKTGSKVSGPVPLPTKKEVVTILRAVHKYKDSREQFEQRTHKRLIDIIAPNQKTVDALSRLEMPAGVYIDIKMKTKQPEKGIIDWTMYLEKTKKKPTMKQIWFESQREPENYPVDKELFLHYMDLWGVEIEGYHKEEGMRDLMLQFSNNIFIEILMLAICADTLLGVLRAIKFRQFNSSVGIDGAIRKVAMVVSVGILMLADLLIHVNLLAFIPEEYVHDLGVQKLGMCEFFCLLFTACECLSVLKNMVLCGLPVPKKVESWLRDFLANMTSELPMDNGISDKIYEAGEANTNEANTNNSVLNKMKAGGGENVRKMSENKKLLVVIDPGHTGNTYNAGAVKGYYESKAVYDLSLYEKTALEKRGIDVILTRERNQDPGLYERGQMAVKKGNGYANVLFESNHTDAFNGKACGVTVVRSAHLPGSEKLAEKMIDAIVKVMKPSTGITYNRGVVTKTQSNGADWYGVIRGAVSGAASQGQAKNGPVRYDYIVEHGFHDNPKECIFLSKQENLKAIAEAKAAAIAEYFGIGNKSQPANQSGQSSQNNRNNDSHQTNQNTSTDSTTLNKKTAYLVRVSVDDLNIRQAPTIYSKAVGFTGKGVFTITEEATGIVNAAGEKSRWGKLKSGQGWICLDYAEKVAMRCYNERDWEVYLTNGDEKNKNLKYFQGAIEKDILMEKLKEMLAIRIIIEVIIFIYMMSLSIRIRKQKIKKTRRIKIIRIFWMIMFVIVVPYLSYVPIENYFITFKSPEKAMAYEEWLMPKREIDDIIDGKDSCMVIEKRKKNGMISYETEYLRKVQGGYKFLGTLDVKAENIAGTAIIVWHIKGTEDYYLSGVKMSENAADSVNIRDSLGTKFVQKVSDGGHYKEIVIYDYEYYGYMYDITEDYEIYLDGQTHILPSESKYSVRMEVNNSIKCGVHDCKHHAGNVEYCTLNCVSIGACECSPKTKEGTDCESFAARMQHEVTDVQKLLDKQGYVVTPGWARRPVWQYNRENIAAPSFRIKEWDYYLAGNEHYAVAFTLSDLGYAGLISVSLIDLVERKEHTETILTAMPMGRLGLGRTSDDGNADFRNGRIHLRYTVKPHRRRIQCVFRDFQDGKTLTADLLMKQPEMDSICIATPWKENQKAFYYNQKVNCMPVKGKVNFDGRDYIFDGRKDMAVLDWGRGVWTYDNIWRWGTCSTRLNGVPFGFNLGYGFSDRSSATENVIFYDGRAHKLQEVVFMIGQDDKGNFNYMDPWTISSSDGRFEGIFEPILDRKAKIDMKVIASDQHQVFGHLTGTAVLDDGTELKMRDVIAAIEVVHNRYMEERNISHVTEAAVGGAAVIRRGLHERSSMRGAVELRTDGCTDLQMDSNKQYIVTKWYGSSLAIFEEAAFQKYLRRLDTDFKDNGHGQSVIRYFLSAAVTMMTEESDGWRIPPELLTCIEKDGERLEYWECEINSSYQDSLPVFVVAASGNMDSAIEMTKERHAAMGGYLNPGNEKFGEALNSQIYVDKTGLIEYTNRVMYSNQKYVCVSRPRRFGKSMAANMLAAYYSRGCDSRELFQGLKISKADACEKKLNQYNTIFLNMQEFLSQTSSMDEMLRLVKKSVLWDLFFEYPDINYFDKENFSRAMQDVYQQTKCPFVIIIDEWDCIFREYRENHEAQEQYLDFLRDFLKDKAYIHLAYMTGILPIKKYGTHSALNMFDEFSMTNPGPLAEFVGFTEEEVAALCKQYGRNLSELKEWYDGYHFEKARSIYSPRSVVTAILTGICDSYWNRTETFEALRFYIDMNFEGLKDDVLSMLAGERIPVNTGTFSNDMTTFYSEDDVLTLLIHLGYLGYDFSYKEVFIPNSEVRGEYINAVAASQWGEVSKALKNSSDTLQAIWQKYPEKVAEGIEQAHFETAHIQYNDENALSYTISLALYAARNFYTVYRELPTGKGLADMVFLPRRQFPDKPALVVELKWNHSAEGALAQIKEKQYCKSLEDYRGNILLVGVNYDKVTREHTCVIEEAEKMKNILEYLEHSVGRRPEKTACADTDTSMTWRQLREASARIGSLLLKHRLTHRPVAVYMEKTPACLAAMLGTVYGGDFYTVIDTKMPWDRIRKIFSVLKPAAIITDRDHEETVREALASERKDSPKILLYEKAMYVPEDREGLAKIRRKAVDTDLVYTLFTSGSTGMPKGVAVSHRNVMAYAEWVKTTFDINEATVFGSQTPFYFSMSVLDIYTTLAAGAELQILPKQLFAFPVRLLEYMNSRKVNTIYWVPTALSIVANWKVLDYVSLPYMEKVLFAGEVMPVKQLNYWRRKMPELLYANLYGPTEVTDICAYYIVDRDFADSETLPIGRACDNCDLIILREDGTEAAPGEIGELCVRGSFVAGGYYGDPDKTDAAFIQNPLNPWYPEKIYKTGDLVRYNDRGELLYLGRRDFQIKHMGYRIELGEVEAAAGAASDVKSCVSIYDEVHDRIVLFYEGGPKNENQMRVLLEGKLPPYMRPGECIRVKRMPENANGKIDRKYLKSYYTDLMDGQAIGMKELLDILNKVKPGIDYVNEKHLVSDELIDSLDVMTIVTEICDEFDVEILPTDVVPENFESVEAMWQLIMRLQEDMSYTSYFYLLFFLGVLVALYYLIPLKKRWLVLLGGSYFFYWMASGKMIVFLLITTVSVYLGALAMEREQQAFDSVRKSLEKEERKTRKAVMMRRKRHIVFAMVLINVGLLAFLKYYHFFSANINALGSHLEPGFQLPALKLLMPLGISFYTLSAVGYVIDVYRGQTAADHHFGRLALFLSLFTNITEGPISRYDQLAGQAFEGHRADYRQFTFGAQLILWGLFQKMVLADRAALLVSTVFGSPSDYSGGIVILAMFVYTLQIYADFAGCMDIVRGSGALFGIEIARNFNQPFFSKSIGEFWRRWHMTLGAWFKDYIFYPVTLSKTNMKLGRWAKKHLSVHLGQAMPTAFALFFVWLANGLWHGAAWKYVAYGMYYYVLTLFGLFGKPVIHCFYEKTGIRKESRPWQLLLIIRTFILVNIGMLLFRANSLRIFAEMFESMFRKTTGNWLELGLDRHDLAVLALGALLMLMVGIVRERGICIRERIASWPMVLRWTVYAGVFCAIVLLGAYGSGYGVVDPLYANFMHISNRKQFAGRALKMIAFVLLTVLLLVGMSKTLVPRSNSASGGMHNYRARGFYGEEKDSLDVVAIGNSDLASGFSPMELWKTHGISGFACGEPNQTIDQSVRLLQEVLTCQRPKVVILETDALFQENMDGHLTSLVKTAANYLFPVLEYHDRWKSVTISELMGKPQKPWHDAAKGYRYSDDRVAYKGVDYMAKTDDREEIDAIALQSLNQFVEICQNADIQVLFVEMPSANSWNMARHQAVADYASDRNIPFIDFNMKDMMTKTGFDWLTDSRDGGNHLNYSGAKKISTWLGNYLGSQYQLEDHRKDSRYQRWQQDSADYNRIVFGADKQPADENMIEVKNLVKKYGDHIAVDHLSFTVEEGHIYGFLGPNGAGKSTTMNMITGYIGPTEGSIMINGHDMLENPEEAKKCIGYLPEIPPLYTDMTPLEYLRFAAELKGIARNKKEEEVQKVIADAKLEAVSDRLIRNLSKGYKQRVGLAQALLGYPEVIILDEPTVGLDPAQIIEMRGLIRSLGKKHTVILSSHILSEISAVCDDVLILSHGKLVASDTTDNLGKLMEDKVTLHLTVKGDEAAIKGVLDAVDGVENIEYTDSEEKGCVDVMIQSDPKTEVREMIFYRLAAVQCPIYAMNQMKKSLEDVFIELTADGTETSAKAQNNEDPHEEDFHEDELHEEDHEEHEEHPGETDETDEEDGKEAAEHDSDLMTAIYKKELRSYFTSMTGYICMAFMLVVIGIYFAVINLSSGYPYFGYTLSCVIVLFLLMTPVLTMRILAEEKNRKTDQLLLTAPVSLWKIVIGKYLAMVTVFGLALLITCFYPLILSRFGTVSLPMAYTAILGYFLYGAACIAIGLFISSVTESQVIAALLTFFVLLVFYITGVITNALPSTAVASFVIWIFVVLFAAWLVYNLTSNIKIAVAAAIIAEAVNIIIFFVKSEWMAGSVAKVLGAFNMTSFFSNFGSGVFDITGILYYLSIIGFSIFLTIQSIQRKRWGGDALMTAVVLAIIVVINLAVGQIPVKYTQFDLTDNQLYTITDQTKEFVKGLDSDVDVYLVAQSGQEDEQIQKVLERYESLSGHIKVHTKDPVVNPSFTKQYTDSSLSDNSLIVVCGDKYKVINYSDIYQSEFNYSTYSSQTTGFDAEGQLTSAIDYVTSDTLPKLYTLTGHDEASLSDTLTSQIEKENIDIEELNLVTSESVPDDADCLMINGPQKDITADEKDRILSYMENGGHVLIFTDYTETDMPNLAELLNNYGLSTSAGLIFEGNSQYYYPGYPSYLIPRIQSADAVGSMTSKDLVLMPYAQNINISDDVRSTVTTEALLQTSSKSYIKTDLKNLTTTEKASGDEEGTFTVGAAVTENYNDVETKLVYFSSSAILDENMNQAVSGGNYELISNVMSWMIDKEESISIPTKSLSTTYLTVTAADAGFWGAVVILIPAALVIGGGVVWFRRRRKMKNRKKALIIAIICLAAAAVLYLLVVKLSQRSEDADSSDDSLVISSVDSGQITAISYEKDGKSLSFRKEDGTWYNAEDKSFPVDQDSLTTMTNALGAVSATRKLDSPEDLSEYGLDSPVLTVRYMASDGKEAEFTVGDTNDAAGGSYLKISGDDAVYLVASDFADTFNSDIYQLADMESFPTITSDSITDINVKSGSHTLEIKNDSDGGGIVLENGEEKENCASSSVTQFINTVTGITFKSHVEYNCKDLSKYGLDKPTADISVDYTTAETVTETSAESVQETADTEETESETETVEVAKQLILHIGSQNEDGDYYAALDGSKEVHVVSGDTIKELVEKKAADFTDNTILSGSLNNAKGIDVAIGSDSWHLVKKEVAKADDLADSAETEGTDSEKATETTDATADETTADAEKVDESETETEEKWYAGDTEIALTDLSSAYSDLSGMSAEKILDTAAKSTGDAAISVTVKWEDDTETTVSFTVYDSSFHLAEINGEARKLVNKRDVEKLVEDMTALLKKMIVNFSCPNCGADMSYDIKLGKLYCAHCDHSEDIRPDEENYKNAAEEPADKPRYCVNCGGLLSAGAKTCATHCEYCGAPLVMADRLSGDWRPAYVLPFELDREKAEAAFRKWCHNGRFSPKGFMAAKNIQRLQPLYIPYWLYDMNASVDVRGTATRVNIYVRGETEYTETDFFDVRRKMRLEYTKVPHDASEKMDDTLMAKLEPYRFDTLKTFQIPYLAGFEADQGDYRSEDLLPQVKQQVAGYAAEYARSTISGYTSVHIDHQQMDYDHISSNYVYLPIWFISYRYRDKDYIFAMNGQTGKVIGEPPVSRGKVAGWFAGISAAAFAILMVIGGLLMKKILNFLMVMLLVMGLGMASVMTAFQAEAAETAETAGETVSAAETVLTANQDGEAVADASMSASGIYDAADLLSADEEASLLTKLEKYSERYSADIAIVTTDDAGGLSAQAYADAYAEKIGQSMSRDEYPGILFLIDMDNRQIYMATQGRAMNYYDDYRINKVLDNCYNHITDGDYKGTCDAFLKGVRDYMGRSTDRSARMDAFGVLLRLIIAIVIGAVVTFAMVFRRGGRVTTNSRTYFDASGSHLDAKEDRFMNRTVTRRHIEKPKGGGGSGGSGGGGVHMSSGGGTHGGGGRSFMKIHEITPKDYTDLHRLYCQLEDDWTSDIQDMIRVLEEVKDDPHYHLVGIFDDADKLVGTITLSKCLDLTAKARFYYSLENLVIDENYRQQGYGQTLMQYVEDYVRRHNGRYVNLTSSIHRTDAHEFYYRIGFPRNYTVGFKKNVVDDMIHLNTYEELLQDADDEQVRVHESVDLNGDSTGEKRLDGLYIDGHIALDSQLKTTAEKTSILAEEMGHHFTSVGDITNLKNVNSRQQELDARLWGYNRLIGLRGIIRAFEHHCQNRYEMAEYLDVTEDYLEEALACYRSKYGVYTVVDNYAIYFIPNIAVARRFMKSTVGETLRKCRIAAGKSVREMSELLTANGFKASEKTIYSWENGNSQPTPDALLVMCRAYGVEDVLGTFGYAPEKPTTIAAHFDGNEFTPEQIEKIKAFAAFIKFDDQRKMTSISRKLRKLNKIFFKCKNTCKKECLRKAELNAENLFLKIREYSWNSGMGLPMMTWQHYLYDGSGQLMVIRYKGADYYYIRDGLMTITGLVDANGAAVVNYRYDSWGRLLGITGSLAETLGKDNPYRFKGYYYDCFLSSTFPRELLDKEASPALGCTEPMMFALAGAITRKHAPGKVLRVDMVGCGLMVTGVQAVGIPNTGGKTGAFLASAVGIVNGDAEACKEVLHNIRPEDVVAAEELIQNAEFTLDMDNSTGKQVYFKLTLTTDEHVATVIFEDEHHTWTYLEADGKVLVDNRKPAGEMLIPANDIDWDVFTIENIYNWCKTADISEFGRAKEAVEMNTKVATDGLENPRGIQTARILRKNVESGFVAEDEITHVLMWGTAGPDARMGGSDYPTMVSTASGNQGLMVVMAPWASAQYRKMSAEDGYRAVAFALLMNTFMKYASKEYVYMPPTCSCATTMELLDVVDENGIPTGETVERSIAHAKGIRHRTSHVWLLRRRSKCVEVLLQKRSDNKDSFPGCYDTSSAGHIPAGVDFEDSALRELREELGLTADSSELNDCGLIRIQSESFFHGKPFKDNQISKVFYLLKDVEPEQMQLQDSEVSGVLWLPLDECRRRVRDNSMPHCILPEELDMLPFMNKRMMQIFNTKMMGNCWKAVENSHKSLDKMGGSWNNKCQMIALGHQHSWTTDMMMCSCGIMCGMHMVDDTVVFDAQMRVPAFLCNGDCCMIISCTEASGAGGHDVIAYMRERGFYVMSDIEVRHLSKSFDLKGVKVEALKDINLSIKPGDIYGIIGMSGAGKSTLVRCLNFLERPTEGEVLVGGKDLSTLTEKELRKQRQEIAMIFQHFNLLMQKNVIDNICFPLLLRGEKKADARRRAMELLKLVDLEEKANAYPSQLSGGQKQRVAIARALASNPKILLCDEATSALDPQTTASILALLKDINEKFGITIVIITHQMAVIREICKHVAILNHGVLVEEGEVEEIFNHPKSEAARELILGDISENQWNGETRQKERVLEDKCLRIVFTENSAFEPVIANMILKFGVPVNILKADTKNVGGIAKGEMILGLPEGHELQEQIKAYMVEKGLEIEEVTQYVMFSQEVMEMLIKGIGETLYMTLGATIFGYVLGLPMGIIMVTTSKDGIRPNAGVYKVLDVIVNIGRSIPFLILLILLMPLTKAIVGKSYGSTATIVPLVISAAPFIARMVESSLNEVDSGVIEAAKSMGASTMQIITKVMLVEARTSLIVGVTITLGTVLGYSAMAGTIGGGGLGDIAIRYGYYRYQADIMIVTVVLLVVLVQLFQTIGMKLSVRLDKRKMKKRFLAGVLAGVLAVGALTACGSSNTQSSTAAQTEAGTETAGTEAAGETTAASGDLTPIKVAASATPHAEILEQAKPLLAEQGYDLQVTVFNDYVQPNEVVESGDFDANYFQHIPYLESFNEEKGTHLVNAGGIHYEPFGIYPGTKSSLDDLAEGDTIAVPNDTTNEARALLLLQDNGIITLKDGAGLEATVNDIAENPKNIKIQELEAAQVARVTGEVAYVVLNGNYALEAGYSVGKDALAYEKSDSEAAKTYVNVIAVKEGNENNPAIKALVDTLKSDTIKQYINDTYDGAVIPFEDMVEKIAFTKEEIESRVKVPAIVEVELKHLIEERLKQSGLYYRIFSRIKTSESLARKYQVKSYNADKKIQDLVGLRVDVYFEDDLRICRQMMERMFSLVEWSESEQNEVEFKPVKINGVFRLPDYLKQQISDETWEMCIDDTFEIQLKTVFFEGWHEIEHDMKYKGGELWSGKNSFARYFNSILATLELCDKSLVTLFENLGHELYKERNWAGMMKAHYRLKMEERPMYPELEELLNNDRSEENLGKRLFKTSRQVLVEELLKQPRRVPINVNTIAALVNEAVIHDERLEKLFHDRDVFDDGNENIGEEMTFGKLRPLRKVTVFKALVNLSTYKYSKHDACIEAARLAYSWIYDKYGHLDGDLPTEPMTFEKNLLGYRLVIVYEPEHDYWKMNCMHIDMEAPGQVWVTEAECYPEEDGRQMLSVRNSYAVSEERRGYLNRYFSCPKFYSNIADKVGLFDVRYLSTSRKIIREYQIKKIHDLILSRRRTMPVCLVVSYERDNGWLNEDWLENFRVYDFTRMAGRYTHIYTCNMDIGNQLLESLDIPLEEPTVFVFKSAVSVRNGDIIGQRTVYKEEDILNCSFGRQQMKQEGRRYDIVKGGQAFYHKLLQEMRAEMMDAMIQDIAPHHYHNEYHHFEIQKGDCVLFYRKREVLLAYDDEQIVYPKYEEISKKEARQYSYLFRIDDCRYFLCSEIDETLLDLYHFESIQKMRKAQPKYQAFAGVTGLQLAEWYRSRRFCGRCGAAMVHSTEERMMQCPECGLMEYPKISPAVIIGLIHENKILMSKYAGRAYKNYALLAGFSEIGESVEETVHREVMEEVGLKVGKLHYYKSQPWSFTDTLLMGFYAELEGGEDITLDQTELSMAEWFEREEIPVTYEDCSLTNEMIMAFKEGRSHFNMLFIAYIVIAIAALVMVYFGHLQGTSQFYTSILGATIVLYCVYLDFKKRREKKAEENKKNGKSVKKTQHSGKKSNTNISQNARRSTKNIKMYAILAFIPIIVTVVLMVAFNWPAKRALPLAWILAAIIGVAVWKMSIGAVALQTVIGFLEAFAVLVIIFGAILIMNTLSSSGAMAAINGMFTGISPDARIQAVIIGFIFGAFIEGAAGFGTPAALAAPLLISVGFPPLAAAVVALIYNSVPVCYGAVGTPTNSAMATLGESVTSLGGNVDSFKANLTFFSAVNMAVGAFFIVTIGIILLVTMFGKDAEHKKVAKAFEILPFIIFVCVVFDVIYLLIAKFIGPELVSLVAAVITLFVVLFTSKKGFLMPKNIWTFGEKETWDHSWLNTTEVPEPKQSNMSLVKAWIPYLLIGLALVITRVWSTLQPDSWAGAMKAFKVTLPLFGGASWSWAVLWNPGIIFIIVGLITIPLHGMNGDTVKEAWKNSFTQVKGAAIALLFGVAMVYIFRNSANDGIQVSYMIDGRTAGLGSMLTMMADGLGSIFRGAYIVIAPLIGVLGSFMSGSNTVSNTLFSSLQFETATLVGLPQVIIVALQNNGGAIGNMVCVNNVVSACATTGTNGNEGKIIRTNFLPCIVYCVIVIVVSLIVISLGGATVLGAMKTVNFLYGRTTFDLEVPDDTPVLTSNVDALKSDKDGYEIVKEAMDHPIDSPHLYELAKGKPDCTIIISDHTRPVPSQDILPHMIRELRCGNPDIKITLLVATGFHRPTTVEELKGKLGDALYEEFKDNIVVHDAHDPSKNIKVGNLPSGPDCIIDKVAYNASLLVAEGFIEAHFFAGFSGGRKSVLPGICDAVTVMGNHCGEFIASPYARTGILDKNPIHEDMVAAAEMAKLAFICNVVIDEDKKTVAAFAGNFKTAHRKGVDFLSGYCAVKPAPADIVITTNGGYPLDQNAYQCPKGMSAAEATVNDGGVIIMLATCQDGHGGESYYHSIADAESADAFFQQCLHTPQVETLPDQWCAQIWCRIVRKYKVLFVADKAQEQLIRDLKVEYFETLDEAYARARELKGPDATLTCIPNGVSVVVKDMNITVIGCGRWGSFIAWYLDRTGHTVTLYGRKSSSHIQQFIETRSNGLLTLPESIQLTTDLDAVDKADVIVISIAAQSLDSLMTQLQTMKLQNKIFVLCMKGIEIGTGRRLSQIASAHLDVSNKVAVWIGPGHVQEFYNGIPNCMVIDSEDEQVKKQLLEAFSSDLIRFYYGQDMIGNEIGAAAKNVIGIAAGMLDGFGLTTLKGALMSRGTREIARLIAAMGGNELSAYGLCHLGDYEATVFSKFSHNRQFGESFIKGEDYGQLAEGYYTVKALVELSERYQVELPISKAVYGILYEHADPRMTLHQLFTRSLKNEFMIHTIRELIENKSVLILGYGREGRSSWQRIKEAGSYSRIAIADMNHVQLEEGHPAELICGPDYQKCLDDFDVVFKSPGIVLERDIHDYRCEIVSQTELFFRRFGRQCIGITGTKGKSTTTTMIYHILKETGHDCVLVGNIGIPMFDMLDQINEQTLIVCELSCHQLEYVTCAPHVGLLLNIHEEHLDHYGTMEKYVAAKENIYRPQKSGDILICNVDNLPEEGSYKGRLIKVCDRDEEGRGTTAADVTVSGSIIKTKKHTYQIPTAQIRLIGHHNYVDIAFVYAVCAMYDISDEDFSKALITYHPLPHRLQYIGEACGIRFYDDSISTICDTTIQALKSLPDTDAVLIGGMDRGIDYSELIQFLSVCDVPHIILMEATGRRIFEEIGKYYPAFNGTERIKLVYHLDGAVALAKKICRQGHCCVMSPAAASYGIFKNFEARGEAFAELVREGVMYRYILFDLDGTLTDPKEGITKCVQYALQYFGIEADTEDLVDFIGPPLLESFQKYYQLDDAQGHMALKKYRERFKDIGIFENGVYPGIHTLLSDLKKQGRSIALATSKPEVYARRILDKYELMPYFDVVVGSEMDGRRTDKGEVITEALRQLQVADGQRQEVLMIGDRLHDMIGAGKNHVDKLGVYYGYAHEGELEEAGADYTVCTVEELYDFFKAHMDKVYEKAYEKVIDYIESNILDGHFEVGDKLPSERELSQMLSVSRNSVREGIRILEVIGVISSQHGIGNYIADHFDKTLVQVMTMMYALEKMTYNEIREFRYAVEFQAVVLAMDNISHEQIEKLKANLEVLENSADEEEQVMSDKMIHYTIVEASGNRLVMANYLALAKIMDNFIRETRSKIMTNERKSMTFQGIHRHLVEAICNRDLELGKRALDEHFVYICKNMDTMEKRAEKKSYYKIHHFILQWLFFKKKNILIPLRFVEPGKIQLDSINMAVYIDVIVDISVNSLDRIFQYRVPEELLDAVTVGCQVNVPFGSGNRRRQAYVIGVDTVLAYDVSKIKDILGVTKAPAATGQLIALADWMHERYGCTMAQALKTVLPVKKSVKEVKRTAYFLADREGAQQLLEKSRKSRREKARVRLLEAMLKEGCMSKETVTGVLQISASTMKSILQTGVIREETSQVYRNPVRQRLDGWQEVCLNDEQMNAVASIWQNAAICREHWSREQGMHLLYGITGSGKTEVYMALMEKVLNEGRQIIVLIPEISLTLQTVSRFYARFGSQIAVMNSRLSAGERYDQYMRAKRGEASIMIGPRSALFTPFDKLGLIIIDEEHESAYQSEIVPRYQAAEVAARRAEMSGALVVLGSATPSVAVYQKAREGMIGLHSLTQRARTGSRLPDVKVVDLREEFRMKNRGILSQSLHEAMDACLKRGDQMMLFLNRRGYAGFVSCRSCGYVVKCRHCDVSMTVHHHTLLKCHYCGSEQPMPRVCPSCGSPYIAGFGVGTQKVEEFVQKEFPEARILRMDRDTTSGKDDMGRILQTFSEGGADILIGTQMIVKGHDFANVTLVGILAADLSLFAGDYQSSERTFQLLTQAAGRAGRGDRPGEVIIQTYQPEHYCIQTAAAQDYDSFYSQEIRFRQMLHYPPDRQMMVMLAEGEHDQQTGQAVQKLREIAGEADFEAVEFIGPSRAGIAKAKDLYRYTMYMKHQDIKELMRLRDFLEGYLKWSQQFSNIYFTFDIRESMAIRKLRYEGDPVLGKVCKEVKEMTPHLKELVQDMLETMYAAEGVGLAAPQVGVLRRIAVIDVGEGPYVFVNPKIVETAGEQIGDEGCLSVPGKSGTVRRPEYVKTVAFDADMNPIEVEGHGLFARAMCHEFDHLDGHLYLEKVEGPLNEVSYADEDENMKAVFMGTPDFAVPTLQKMVDMGIEITAVVTQPDKAKGRGKKVIYSPVKECALAHDLPVYQPVRIKKDPEFIQTLRDMAPDVIVVVAFGQILPKEVLDIPRLGCVNVHASLLPKFRGAAPIQWAIIDGEKVTGVTTMLMDVGLDTGDMLLKTEVSVDAKETGGSLHDKLAAAGGELLERTLIGLEAGTIVPEKQDDSQAGEYARMLDKELGHIDFNQPAVVIERLIRGLNPWPSAYTYIDGKTLKIWEAEVLDRNYGCEYGEVAEVTRNSLIIQTGIGALSVKSVQLEGKKRMDISAFLNGYTIEKGTRMDFENETNEMYYPMYVDPTYILIIIGVLLSLAASTKVKSTFGRYSQVRSLSGLTGAQTAERILRQAGIYDVGIARVSGDLTDHYDPSSKTLRLSDSVYGSTSVAAVSVAAHECGHAIQHQNNYVPLKIRGALVPIANFGAGISWPLIVIGILMGGSSLLINIGIWMFVAVVAFHLVTLPVEFNASSRALKIMESSGILHGDENRYAKEVLGAAALTYVAGAASMILQLLRLLILTGAFRRNDDERMADNINTRAIVYDMLMSVEKENTPSHLLLSQTLMKYQYLDKRDRAFISRLFRGTLEYEIFLDGVIRQFSSVRLNKIKPPIKVILRMSVYQILKMDHIPDAAACDEAVKLTRKRGLKNLSGFVNGVLRNISRNKEVIHYPDPEKTPAAYISMRYSVPEWLAEMWLRDYGFEMTAEMGQAMLDDQKTTVRVRDSQNMAAVKEALRSEGLNIEEGCMLPEALHLSGYDYLGNVGPFADGRITAQDESAMLAAVAAGIAGGESIIDVCAAPGGKCMHMADILKGSGQVSARDLTEAKVLKIQENLKRTGLKNVSAEVKDALVFYPEDAQKADIVMADLPCSGLGVMGRKADIKRSVTPEKITALAALQREILSVVQHYVKPGGVLVYSTCTVSKAENEENMQWFEEHFPFGLESLDAYVPEKVRNEQTKAGWIQILPGQYQSDGFFIARFRRSRDEGAEMSDKTDIKSMTLPELEVFTTEVLGEKKFRAKQIYEWMHVRLADSFDEMTNLSKDLRQKLSEQCVLSHLEMVEKYVSAIDGTAKYLFKLSDDRIIESVLMHYKHGNSVCISSQVGCRMGCRFCASTLGGLERQMLASEMLDEIYQIQKDSGERVSNVVVMGTGEPLDNYDALVRMINILTHAPGLDISQRNVTVSTCGLVPKIYELADLKLQITLAISLHAVNDEKRRELMPIANTYSIEEILKACRYYYSQTNRRITFEYSLVKGVNDSREDAKALAALLEGINCHINLIPVNPIEERSYRQTEADAVLKFKNMLEKYGRNVTIRREMGRDIQAACGQLRKKYMEQSGEKEGMQAYAGTDIGCVRTMNQDGYFCSTTPIGPFPNLFIVADGMGGHQAGDYASRYAIETFLDYIRHTENRNLIRVMDEGIAEANRKVLEKSFENEELAGMGTTMVVAFAEDGQLYVANVGDSRLYLIGHEINQVTEDHSYVAAMMRAGELTEEQARNHPEKNVITRAIGVAWEVKADFFEVDLKPGDKVMMCSDGLSNMIEDQRLYDVISSNSVEDSVRILIDEAKENGGYDNITVIVIEPRIEEVNECMLIPGSYLINRYEIIMKIGSGGMADVYKAKDHVLNRLVAIKVLKQEYSTDATFVKKFRVEAQSAAGLSHPNIVNVYDVGEDEGVYFIVMELVQGITLKNYIDMKGKLDIREALNISVQIASGLSAAHENRIIHRDIKPQNIIMSRDGKVKVTDFGIAKVADSTTVTTTAAGTVHYISPEQARGGYSDERSDIYSLGITMYEMVTGRVPFEGETNVAVALMHIQSEITPPRQLEPSIPVSFEKIILKCTQKKPERRYASARELIADLRKVLTHPDGEYVVIPGAIPQGRTIVMNDNDIDSLKAASLRKNFGTKPEETYVEEPEEEEEEKPVQKPVQKPVQKKRPVKKKDLEEDDDDEFDKDEEDDDDEEVNPALSKVMMALGIGGFIILAVIIFFIIGHAAGFFGGSGSLFGHKNKDTSTESISTESVSDTSSDTSTAGERVKVPDLSKKTEDEAKAALKELRLGVNVQTGTSDDVPEGQVYDQSPAAGTKVDVHTQVTINISSGKEKFSLDDVTGMQYQQAQAQLENDGLVVSLEFDYSDSVGSDKVISTSPKAGSQVAKGDTITITASKGKETKTTTVPNLLGQNIDDAIQMIKDAGLTYNGKSSDYSDSYSENQVMNQSISAGKTVDEGTTISLTVSLGSRVTSYSASIPIESPFGRDITDGDGNTDVYDSGQVTVVVYKPDGSSETVYDQNTSEGSLPGSVSTTSTASGSGTVYVYLNGVQVSSYSVDFEMKGKIIKGIAGFYYVHVNGKGIYECKAKGIFRNRKIKPLVGDDVFLDSLDENDMKGNITEILPRRNALIRPASANVDQAMIIFAAAQPAPNLGLLDRFLLMMERQELPTIICFNKQELISGEELDRLCSIYRGSGCKVLTVSVKQQEGLDQIREILDGRTTVMAGPSGVGKSSMTNAMYPDAEMATGAVSEKIKRGRHTTRHSELFSIGNDTYLVDTPGFSTLYLEGWEKEDLKYYYPEFEAYFEHCRFNGCNHLSEPDCAVKEAVAAGEISSERYENYKLFYEELASQRRYMYELKLSPSILSADFGRLGEDIKTADQAGADYIHIDVMDGAFVPNISFGIPVIKSIRKCSDKVFDVHLMIEHPDQLIPEFAKAGADIIVVHAEACKHLHRTIQLIHSLGVKAGVALNPATPLSVLDYVLEDLDMILLMTVNPGFGGQSYIPAMTEKIRTLRHILEEKGLQTDIEIDGGVDTKNLRMVIEAGANVLVSGSKIFGGDIAENVHQFKAIMAEYTKMRILIITGGRIDEDFALSLLEKEKFEHMIVVDGALAFWDKVEKNPDITCHFDHLVGDFDTISPEILKNYLDREDIEVHRFNPEKDYTDTDIALKLAIHLTKSETGKADARSEIWLLGATGTRADHMLANMQLLAQTRAAGVDGVIVDKNNKIRLLEGSYTLKREAQFGDFVSLIPVTQALKGVTLRGFKYLLDGHTTYWGESLCVSNELEAEEGYISIEEGLAFLIESRDMIHTLDTIMSEYYQHVDVYKKMQHDVEDIINTLIEANHIKISTMSLRIKSEQALRNKVISKDKYQHLEDITDILGCRILTLFESDVERILELLEDTFEVCEIVDKRKKSKHNRIEFGYNSVHMVVKFTDERCKLVEYQKYQDIRFEIQLRTVLQHAWAEVEHGLGYKSYYEPPMDIKRKLNRLAGTLEILDEEFEAIRYEITLYNQSMNKVEKILKTDINKESLTAFANKSELIQEMVAQVADKYHFTVIQDPAIFSQQRLVAKLNFYGYQYIHELNDDMHQYQKSILAIGEELSQKINYDITSINYYSPILWFSFIPVIKNLLAERDASSENIVDDVILEAFKMNNGSIFNFFMEHHLQMSYADQVFINMCRDILDNGCSTEGEKVRPKWEDGSYAYTMKKFGVVNRYDLSKEFPALTLRKTAIKSATDEMLWIWQRKSNNIHDLNSTVWDEWADENGSIGKAYGYQMGVKHQYKEGMMDQVDRVIYDLKNNPYSRRIMTNIYVHQDLHEMNLYPCAYSMTFNVTKKPGDDKLVLNAILNQRSQDVLAANNWNVVQYSVLMHMLAQVCDMQVGELVHVIADAHIYDRHIPLIEELISRETHPAPIFKLNPDIKNFYDFTTKDITIENYVTGPQIKNIPIAVMNLIVAVDKNWGIGYQNKLLNSIPEDMKYFRETTTGKVVVMGRKTLESFPNGLPLKNRTNIVITGDHTYKAKDAIIVHSIEEALEELKKYDSNDIYVIGGESIYRQLLPYCDVAHVTCMDYTYQADTWFPNLDEDKDWVVAADSEERTYFDLEYCFKMYVRKTKLKEIVDLLKMEKKNLDWKHIGFAYHTTDYRYVADYKDGKWQEGYMSDSPNIVLNECAGIMQYCQEVFEGLKAYETADGRIVTFRSDLNADRMYHSAERMEMPPFPKERFIEAVEKVVKANEAWVPPYGSGATLYLRPYMYASSPVIGVKPAEEYQFRLFATPVGPYFHEGAKPITICVSDFDRAAPKGTGHIKAGLNYAMSLHANVTAHANGFDENLFLDPGTRTYVEETGGANFLFVTKDNEVVTPLSDSILPSITRRSLVYVAEHYLGLKVTTRKVRLDELKDFAECGLCGTAAVISPVGKVVDHGKEICFPSGMEKMGPITQKLYDTLTGIQYGKIEAPEGWIHEIMMSYIEDLMQFGLTRQESAIYYALLSEGMMTGYEAAKVSGVSRSNAYTALAALVDKGAAHVAEGTPTHYVPVDPEEFCGSKLDYLKLLSVRLVEEQPRRQREDDAYITISGFQNICQRAARMLDQAQYRIYMTGTAAMLELFREKLEDLVGRQIKVVLITEPGFELDEAIIYHSSHIEAGQIGLISDSTHVLTGDLSESDSCSCLYSGKKNLIDLFKQSLSRQIQLIELGAAEERKMKKVPFVTKEQLDEIVKKYPTPFHLYDEKGIRENARKVYKAFSWNKGFKEYFAVKATPNPAILQIMKEEGCGLDCATKVELMMAKACGFTGHDVMFSSNVTPANEYAYAKDMGVIINFDDITHLKYFEENVGEFPETVCCRFNTGGDFKISTAIMDVPGEAKYGFTREQLTEGFKYLKSKGVKHFGIHAFLASNTKTNDYYPALAKILFKTAVELHEETGADIKFINLSGGVGVAYSPDETPNDIEVIGEGVHQVYDEILVPAGMGDVAIFTEMGRFMLAPYGHLIATAIHEKHIFKEYIGLDACAANLMRPAIYGAYHHITVAGKENEPCDHMYDVTGGLCENSDKFAVNRMLPKIDMGDYIIIHDTGAHGFSMGYNYNGKLRSAEVLLKEDGSTELIRRAETPMDYFATFDYTGLFDRFKDGNEMIRAVIFDMDGILLDTEKIYCHFWMEAGREAGYDWKMEHSLMLRSMAPEFAEPMMKEVFGQDFDYHAVRNRRKELMAVYMETHPVEKKPGADELLTYLKSHYFKTAVATASGETKAMTYLDEVGLLDYFDQIISTAMVPHGKPMPDVYQYACKCIGEKPEACIALEDSPNGLMAAYRAGCLPIMVPDLSQPDAKLSRILYGKAETLTDVIPYLAASRMKDMKKVRLVKSRTNKLLTGVCGGIGELIGIDPTIIRLIWAALSLAGGSGVILYIIAAVIIPEDDDIIDSEMAGSTFGNQFKITTWGESHGKAVGVVIDGCPAGLALTESDIQYYLNLRKPGQSRYTTPRKEEDAVEIMSGIFEGRTTGTPISLIVYNKNARSSDYSDIARYYRPGHADYTFDAKYGFRDYRGGGRSSARETIGRVAAGAVAMKLLEACGVKICAYSKAIGPVSINPAHFNAEDIFNNPVYMPDMQAAAEAEAFIAAQMEKQDSCGGIIECRIQGMPAGIGDPVFEKLNANLAKAICSIGAVKGFEIGDGFSAARSQGSVNNDAFTTDAAGHITKATNHAGGILGGMSDSSEIIFRAAIKPTPSISRTQHTVTREGEPIDIQIKGRHDPIIVPRAVVVVQSMAALVLIDALMQNMTARVDYLRDFYKNMNEKNIVLNSVEAAKEFVKAASECDFDIDVYFNRIALDAKSLLGILSLDLRSKLRVCYSGENAGFNTVLAKYAAMYQIVATDGRAKSAHMETVHGVIETPVFMNVGTIAAIKGAVATTDLKEIGTQVELSNTYHLHVRPGDQIVKQLGGLHKFMNWDRPILTDSGGFQVFSLKGLRKIKEEGVYFQSHIDGHKIFMGPEESMQIQSNLGSTIAMAFDECAPYPATREYMINSVNRTTRWLERCKKKMQELNDAEGTVNPHQLLFGINQGGTYADIRVNHARTIRDMDLDGYAIGGLAVGETHEEMYRILDEVVPELPQNKPTYLMGVGTPANILEGVDRGIDFFDCVYPSRNGRHGHVYTNHGKLNLFNAKFELDDRPIEEGCQCPACRNYTRAYIRHLLKAKEMLGMRLCVLHNLYFYNHLMEEIRLAIREHRYSEFKKSKLEGFLSKEDMNFSPVVLTGAGTSGIFVLIAYIAVFAVLMYFLSVRPQKKRQKTMDAMIANLAVGDSILTTSGFYGVVIDIAEDVVIVEFGSDRHCRIPMQKEAIVSVEKANDEEMEQLRAKKGFIIDMDGVIYHGNRLLPGAKEFVEWLYREEKEFLFLTNSSRYTPKELQKKLEWMGLDVDQSHFYTSALATAAFISTQTPEATAYAVGEHGLQNALYDAGITVNEIHPDYVIIGEADNYCYDHIVKATKFVNDGARLIGTNYDLTGPVEGGIVPACRALMAPIELATGKQAYYVGKPNALMMRTGLRILGVHSEDAAIIGDRMDTDIVAGIESGLDTVLVLSGVTTPGMIEEFPYRPRLVCNGIGDIAALGDMDRIDLHTHSTASDGSMTPSELVHHAASCGLRAVALTDHDTTVGLTEAQQAANEIGIELVHGVELATWLDKTEFHIVGLDINENNPHFQTAMACMQQIREDRNNQMVARMQAAGVDITLEKLHAKEGIGVLTRANFAGYLLSVGFVKSIKEAFDRYLGDGKPFYIPRTKTSPKEAIELIKQADGIPVLAHPMLYKLGKNTLEKYVKMMTTWGLEAMEVYYSTNTPSDDLYLSHLANHYHLKYSGGSDFHGTYKPHIQIGTGKGRLVVPYDILEKLRAMSFWWIWGIYFMDHVVLRNDFGMDKKLGAVSGGLGIVRVMAAAWLISVMISAVGMVLASLIFYAVGEGQNRISVSVYVVVVLAVLIGGIYAGHRIGYRRFLWGLALGAIYYVTLCLISVVSGCMAAAGWQFCLPFVLLCLGSGMLGGMLGMDKRLLKKVRQFFSWNAERKIVVLHREWVGFSKKIEIISYNARIFLKRALKMQMSMLMKRIKSLNTRSMKQSMVKGGCGECQTSCQSACKTSCTVGNQSCENNKMIHQYKSNGYNIVMDINSGAIHVVDDVVYDIIELYEGHEKSEIMDMLASKYPKEDMEEAFEEIETLIKEESLFTEDIYKDYIIDFKKRKTVVKALCLHIAHDCNLACRYCFAEEGEYHGRRAIMSYEVGKQALDFLIANSGNRRNLEVDFFGGEPLMNWDVVKRLVEYGREQEKIHDKNFRFTLTTNGVLLNDEIMEFCNKEMANVVLSVDGRKEVHDNMRPFRNGSGSYDLIMPKFEKFAESRHQTNYYVRGTFTHFNKDFAADVLSLADKGFKQISVEPVVAPASEPYAIQEEDLPELCEQYDLLAKEIVKRDRAGKHFNFFHFMIDLEGGPCVAKRLSGCGSGTEYLAVTPWGDLYPCHQFVGQDEFLMGNVWDGVVKTDIRDEFKLCNIYAKDKCTNCFAKFYCSGGCAANSWNFHHSITDAYDVGCELMRKRVECAIMIKAAAADEEGEMKSKKKSWLVLIVVVLMIAACGYVSAYGYGKDHIGTAKNIKLGLDLAGGVNITYEADEDNPSSEDMNDTVYKLQQRVEAWSTEAEVYQEGTNRVNVDIPGVYDAEKILSELGNPGSISFCEAKSDAATGKEVLDGYCEVVGGEGIKSAQATSQKDSYGNTQYVVSLMFTDDGAKAFAEATARNIGKPIYIIYDGKIISYPTVNQAITNGQCVIEGNFTYDDVNSLATTIRAGVLKLQLNEISSKVVSAKLGDEAVKTSLMAGAIGLAIVMLFMIVVYWIPGVAAALALLLYVAAMLCFLNGLDVTLTLPGIAGIILSVGMAVDANVIIFTRIREEIAAGKNVREAIKIGFGKALSAVIDGNITTLIAAAVLYLKGTGTIKGFAITLALGIVLSMFTALVITRFVLMALYGIGFKDAKFYGKQKEAKVKNFCGMKKITYVIAVICICAGFVSMGVHASAGNKALNYSLDFTGGTAMTVNFKDYLEVPGSDEDDLRKLFESEAGTTDIQFQNVSGSPEIVIKTPVLDPEHRAAVKDALMEKYALEQSDITEENISGTISGEMRTNAILSVIIAGIFIMIYIWVRFRDIKFGAGAIIALLHDVLVVLAVYSIARIPVGTTFIACMLTIVGYSINATIVVYDRIRENSHTMVKATTEEIVNTSISQTLSRSINTSLTTLIMVLLIYIMGVTSIKEFALPMMAGIIAGTFSSVFISGTIWAVMKGKKKMIPSKTELPNQQFKYIEEAEKTAAVQKVLSKESLDTDGGIGYIYFRIRGVMEFMVFETHGFCNCRLQKRGVFLVPESYRWEFIKQESAGVKQLAAETGYPEVFAGLLAARGVHNKEEAQRFLYPSEKNMYDSFLMKGMEAAVCRISQAMDAHEKITIYGDYDVDGITATSILYLYLSKAGADVNYYLPDRMTEGYGLNENAVRMLAETGTKLMVTVDTGISAVKECQLAKSLAMDVIITDHHECQEKLPEAVAVVDAKQPGESYPFLYLAGCGVAYKLVQGLKDYRNDQTDITEYLELAAVGTVADIVPLYDENRIIVSEGFKRIKHPANMGLGKLLESAGYDFKRKITSGFIGFGLAPRLNAGGRMGDAKRGVRLFTTRDEEEAAAIAAELEVENSHRKETEQMILKQVTDRIEASDAIRNSRVMVVAGEGWHHGVIGIVSSRIKDMFYRPNILLSIENGVATGSARSIDGFNLFEALCTCSDLMIKFGGHAAAAGMSLKAENVPELSRRLNEYAKMHMDSQMLTPVQRPELKLQPSEVTIELIELIQRMEPFGQDMPEPLAEISGQLGEVRKIGADRATLRMTVMDRRRSLNTVGFRRSIMADYYTAGMEVSIAGNLDINYYMDRQYPQMILKDVRIAQDDNLEKLQHIFALRHVTDDYRLYCDARDKLDKSVCSQVFRFLQMQMKKQGNETEGSFMMEDIPFDSIHSAEEHIFMLMQALYVFEELGLMRVETAGPYLHYEMIPGKTAKLMDSMWYRTYFVDFGAFQMKKLEEYVKSIPDFPEKGIIFRDVTSVLQDAEGLHLAIDQMQEKLEGVDFDVVLGPESRGFIFGVPIAYNMHKAFVPVRKKGKLPRATISQTYDLEYGTATIEIHKDAIQPGQKVVIIDDLIATGGTTEAIIKMVEELGGEVVKIVFLMELAGLKGRERLSGYDIDSAIIYEGKMKDDKKEVMGTEEPFEEQELIHTQDFESPEVLYQRLINKVKEYHPSDDISMIEKAYNIANNAHKGQLRKSGEPYIIHPLCVALILADLELDKETIVGGLLHDVVEDTIMTEEDITREFSAEIALIVSGVTKLGQLSYSKDKVEIQAENLRKMFLAMAKDIRVILIKLADRLHNMRTLKYMTPAKQKEKARETMDIYAPIAQRLGISKIKIELDDLSLRYLEPEVYYDLARQINLKRSERQAFVDAIVEEVSQHMAQSGIKAQVNGRVKHFFSIYKKMVNQDKTLDEIYDLFAVRIIVDTVKDCYAALGIIHEMYKPIPGRFKDYIAMPKQNMYQSLHTTLIGPNGQPFEIQIRTFDMHRTAEYGIAAHWKYKEDPNAKNVEDSEEAKLTWLRQILEWQTDMSDNKEFMSLLKNDLNLFADSVYCFTPAGDVKNLPTGSTPIDFAYSIHSAVGNKMVGARVNGKLVNIDYVIKNGDRVEVLTSANSKGPSRDWLNIVKSTQAKNKINQWFKTEFKEENIIRGKDMLNRYCKAKEIILSNLLKPEFMEKVIRKYGFKDWDAVNAAVGHGGLKEGQVINKLLEEYQKKQRKEMTDKQLLTQMTEMKQKPSAAVQPHKKGSKSGIIVKGIDDVAVRFSKCCNPVPGDEIVGFITRGRGVSIHRTDCVNMLHLSEIERQRLIDAEWQDSTADGQGGLYKAELNVYVHDGVGVLIQIAQVFSERDINVTAMSSRSGKNNTATINISFDIGGKYALNKIIDKLRSLDCVYDIARTTGMGQIEIKSMTLGMVATNCYLIINKENKEALLVDPADNALRISNVIEENGCTLKAILLTHGHFDHIMALNDLKKRYNVPVYAHEEEEDVLKQSSLNLSGSIGQIYTTQADVYVKDGEHLKLAGLDVIVLYTPGHTKGGACYYFPEEKVLMSGDTLFHCSIGRTDFPTGSMSQLVRSVKEQLFVLPDDVQVYPGHDSVTSIGYEKQYNPFFMIALSMNRTDYENDIRSLLMAFFYGEKIVLNGEEWNVCLDVRYTENHTALVLKDHNGRSLEKEGDCHFEDYRLGRNDIKNLVYRLLSEYTGMVLPWGTLTGIRPTKLPMEMYESGASRADAIHYLKDTYLVSDEKASLCAIVAENEAKVLKDVDYDHTFSLYVGIPFCPSICAYCSFSSYPLSVWEKQVDNYLDALCKEIEAASTMMGNKKLLTFYMGGGTPTSLSAAQMDRLLTCLEQYFDLAHVSEKTVEAGRPDSITEDKLKVLRKHHIDRISINPQTMNQETLDLIGRRHTTEEVKQAFHMAREAGFMNINMDLIAGLPGETSEHMQRTMDAIVDLAPDSVTVHSLALKRAAFLNQNREQFPVAGADEVNRMIGISHEGALAIEAEPYYLYRQKNIAGNLENVGYARKGCEGLYNILIMEEKQTILALGAGASSKFVFHNEHGHRIERVENVKSVKDYIERIDEMIDRKKNFLLKSENSFMDVIELKKIANEVRKGIVTSVHSAKAGHPGGSLSAADVFTYLYFEEMNIDPADPKKADRDRFVLSKGHTAPGLYSVLAQRGYFPVEDLKTLRHIGSYLQGHPDMKHIPGVDMSSGSLGQGISAAVGMALSAKLSHDDYRVYTLLGDGEIQEGQVWEASMFAGHRKLDNLVVIVDNNGLQIDGNIADVCSPYPIDKKFEAFNFHVIADVDAHDFEALRAAFKEARETKGMPTAIILKSVKGKGVSFMENKAGWHGKAPNDEEYAIAMDELEKAGEALCQKMSEVKKIATRESYGHALVELGKEHEEVVVLDADLAEATKTGIFKKEFPERHIDCGIAECNMMGIAAGLAATGKVPFASSFAMFAAGRAFEQIRNSIGYPHLNVKIGATHAGISVGEDGATHQCNEDIALMRTIPGMVVINPSDDIEARAAVKAAYEHQGPVYLRFGRLAVPVINDRPDYKFEIGKGVVLKEGTDLTIVATGLCVNESLAAAAKLEEEGVHAQVINIHTIKPIDADLIAEAAKKTGKIVTVEEHSVIGGLGSAVCDVLCEREPVKVLKIGMNDVYGESGPAVKLLEKYGLDAAGIYAKIKAWLMSVTRRKFGKTKDGEPVTLYTITNKMGNSVSIMDYGATVQSINIVDAEGEVIDCCLGYNTVAEYEEHTDFMGACIGRVGNRIGGSSFSLNGQTYTLAANEGENHLHGGLKGFDKQMFKAKIDSDDTVTFGRISPDGEEGYPGEFMFIVSYTFDDCDNFVMNYTGWNNSETLDTIASITNHTYFNLSGEDAGSILDHTLELYASSFTEVDEHLIPTGKLLDVENTPFDFRKGKTLGQDINADHPQLKLAGGYDHNFCIDGDGMRPCCTLMSPKTRLKMYVSTDMPGVQIYTGNFISESEGKAGTDYHHYDGIAIETQFYPDALNHPEFPSPVLKPRKEYRYTTVYQFSADEMKHTLALFLKTGCVVCIFLLLCLAAVHHFKPALSSLPVFSRFERKLPIYCVDTDKPQVAISFDAAWGNEDTETLLSILDKYNVKTTFFMTGGWIESYPEDVKKIAAAGHDLGNHSENHKQMSQLSSDECLAEIQKPHDKVKELTGTEMILFRPPYGDYNNTLIESANALGYHVIQWSVDSLDWKDYGADSIVDTILNHKALGDGAIILMHNGAKYTKDALERVITGLQDKGYEIVPISQLIYTGKYHMDNTGRQFKDEMAKLMTAEEAVKAYIKDGMTIATNGFVGAVQPEGMMRAIQKSFLEEGTPRDLTLVHAAGQGGGADAEGNVVGQVNHLGEEGLLKKIIAGHYSLAPRIQKLALENKIAAYNMPQGCISELFREIAAHRPGLITHVGLNTFVDPDVEGGMLNDKAREEGSYVKKVNFNGEDKLFYPSFPIDVALIHASYVDTQGNCSLEEEGTLADILPIAQAAYTTGGKVIVTVEKSHYVEYGSLDTRFVQVPGIYIAAIVLVDSDCAKQTNGSYHNEAFSGEKRIPMSAMEPMKMNARKIIARRCAMELKAGAVVNLGIGMPEGVANIVAEEGIEGMVLTTESGTIGGVPASGGDFGVTTNPDTILHQSFQFDFYDGGGLDIAFLGLAQCDSHGNINVSKFGPKIAGCGGFINITQNTPVVVFCGTFTVKGKNKFLKDVEQITFSADFANKTGQKVLYVTECCVFKLTKEGVELIEVAPGLDIEKDILAHMDFKPIIKDVKVMDERIFKDELMGLAKMDLKMEVTQTLGLSQRMIQSTEILQMSAQELDTYLKELAVENPVVDIEEKFDKSGESERDAELQKKLEWLASSDEQNRVYYSEEYSSDDDDNQDMWNVSDNRGEDLAEYLISQLVTIPLTDKEQAIAEYLIDLLDSRGYLTEETDQIAVQLETEEDEVVRMLQVVQSLEPAGVGARNLSECLLIQMDRQKIEDTIARKIAANYLEQLGKNQLPQIARKLKVTVDDVLQAMEVIRELNPKPGNSFSSRENLKYITPDVTVVKLKDYYEILLNEYMYPKMSINGYYRNMLKAGNDKETKDYVTTKVKQAEWVMQCVSQRNVTLMNVSKCIVDVQERFFTYGPGYLRPLKLADVAEMVGIHESTVSRAVKDKYLQCSWGIFPMNYFFIGAISKAGNENAATADTAKNLLKEIITDENHEKPYSDRILSEKLAERGVKISRRTVAKYREAMGIKDASGRKVFMTTTTHPMADKPIGQLLRQFAVPSIIAMLVSSLYNIIDQLFIGQSIGLLGNAATNIAFPLTPTCVAFSLMFGIGGAARFNLAMGAGRKKEAAAYMGNALLMLVSCGIVLCIIVRLFLTPMLLLFGATDQVLDYARTYTGITSLGFPFLILATGGGHLIRADGSPQFSMICNLVGAIVNTVLDALFIFGFHMGMAGAAYATIIGQIISALLVIRYMCHFKTVPLHLSELKPKVNYIMYIVLLGASPFINQIAMMIVQVVMNNSLSHYGALSSYGSEIPLACSGIIAKVNMVLFSMIIGISQGMQPIASYNYGAGNYGRVRKVLHLALKAGFVISIISFLLFQFLPRQIISLFGSGSEDYFTFAEEYFRIYLFFTFVNCLQPIASNFFTAVGKAQKGIILSLTRQILFLLPLIILLPYIMGIDGIMYAGPCADLAAALLSIYLVVKEVNILKQKETIHVQMSEGNLLSEEITQRLLHEIREGCYANCRKLPPELTLAKEMGVSRTLIRDCLSALEREGFISRKHGVGTIVNPHILNATTRMDLEKEFLEMVSDAGYVSDMKIERIDKIPAGKEVAAKLHIEEGDLVLISERLVTADGRPAIYCMDYIAEANAKEGYDIKLLKEPVFKFIEQCCEQEIYMDLTEIRAVAAGEDLAEILNVDKQAPLLYMDEIGYSFMGEPLLYSREYYVDGILSHKVLRKKIMYTAAIMKTELEASKGTRKLDMRIDNIQLVNVFTREIYPASIGIYNERIVAVGRVETEADQVIDGAGAYAVPGLIDSHIHIETTLLTPEALGEVIIPWGTTTLCVDAMEIANVAGIDGLLAMIKDSEKLPFRLLLEIPSRVPTAPGLETTGGVLGVEEVTQLLELDEAVSLGELDPSKVLGMKEEYLEKVLASLNRRKICNGHAIGLSVDDLNIYAAGHLSDDHESVYYEELLERLRLGIMPLIREGSSERNVDTLVPGIVKNNLPTDNMMFCTDDKHVNDIFKEGHISYNVKRSIELGLDPVQAIQMATINAAKHFRLEDKIGSVAPGRFADILLIDDLTTMKPKLVLKSGRIVADENGARPVPEKAYPEKLFDTVHIGADFSAEKFIIHSEGKRAKCRVIDLIKDQIINKEIFEWMDVKEGQIAADVDRDILKLAVVERYGKNGRVSTALVHGFGLKQGALAASVSHDHHNIVVVGTNDRDMAVCVEKLQELHGGFVSAVEGQVVDALALPLGGLMSTLPAKTVMKRMDEMNGAVEKMGCPMKAPFMSLSFISLPTVPELGLTDFGLIDVLGHQIIDMIVETEAMESYTGKGRGRVEGMDKATGRAVYAADYYEENMLHLAIVRSAYAHARVLDIDTSKVPETAWVFTAKDIVKNNVQDILPDQPLLVEDKARFLGEAIAVVAAESEEAAKAAAAMVQVTYEPLQVVTDALMAAKPGCIRVHDDTENDVIRFDNEKGNVAQGFAESDLILEDDFYTPIQDHGYMEPDACMAKIEEDGRLLVCSSTQNVFHDLRMVCDITGLTEDQVHIVAATVGGGFGGKDGSTAQLFTALAAFKTRRPCKLIFSRQESLATTYKRHAVYMHVKMGFKKDGTMVAFDGSGYLDTGAYGGLGPAVLSLFSEHFAGPYNIPNVKISSHLCYTNKPVAHAMRGFGAPQGAFATESLISRASKLLGIDPLEIRYKNGIETGMYGGVGQKMRHFVDFKGALKLIEQSELWQERKHNTDPYVGYGIAGGHLSCGLGKNIPDQAEVKIEEADGHYTIFLGLVDIGQGSRTALQAMAADALETDFDNVSLVMADTDRTLDCGSTAGSRSTFIGGNAMLNAIENFKKGEMETGKADFPESEESFSIAGFPHAMYTFIAQAVKLRVDPVTGQVVLLDIAAATEAGRIINPLAMAGQIQGGVAMSVGYAFGENCQFKEGRLLNDSMSTYLMPTAMDLPRIQSLHVDGYEPSGPMGVKGAAEVSTVSIAPAIAAAINEVSEGRLTSLPFDIETILNGLKKMKKGLKWMAGLLTLAMVVGSFAGCGSSSSKETAAGESAAATTAESTADTASAETAGKKLKVALILPGKKDDVSFNQAMYEGMKKYADANPDKIDLNVTENVYEVADIEPALMDFADQGYDVIFGHGFQFMEPIVKVGAQYPDTYFLLGTGYKSLDNTAIYDVELEAGGYEMGVIAALATQTNKIGVIGGADASEIKRGHEGFKAGAKSINPDIEIQEVYTGDWTDTAGAKEAAIGMYDAGVDVIWHSGDGIGLGVVQAAAEKDMYCLGNVADQKTLAENNVLSGVVYQWDAIIANVFDDINNGTFKGRAEDDRYYWINAENNGLGIADINDPKGWLTDDDKQVIADTWSKLQSGEIKDYLPEDIQMDNLAVSMQGITKIFNGVKANDNVDFNLRKGSIHGLLGENGAGKTTLMNILYGLYQQEAGDIYINGSKEEISSPIKAISLGIGMVHQHFMLARPMTVVENVMLGKKSRRGILLDTKETATELKELADKYKMNIDPYSKIWQLSVGEQQRVEILTAIYQGADILILDEPTAVLTPQEANILFDMLRHMKADGKSIILITHKLEEIISIVDEVTVLRDGELIGSKLVDEHTTKEELTKMMVGRDVLFNFDKNQKAPGAVKVELKGLSASNDKGLPALTDFNLTVHEGEILGLAGVDGNGQKELCEVLTGLRKADGGQFLFKGKEVINQPPVFYINSGISHIPEDRMTTGLALNWSLKKNLIIKKFHKAPFSKNGLLNQKAIDAYWDKCQKEYQIKANSGEDHARALSGGNQQKVILARELDDHPEMVIANQPTRGLDIGASEYVRQKILDARNDGAAVLLVSADLEEILQLSDRIAVIYDGKIMGILPAGTDTNTIGMLMMGHKQEEKAMNSKIINSIKQFVIAVLTIVLALAVGAILVRISGNDPAEAYTILFRGALGSKARISEVLVKMIPLTLMALGMSIAYKAQLWNIGANGQLTIGAILAILPGIYLGLPTVILLPLSLILSVLGGALWCGLAAWLKNRFNANEVITTLMLNYIATYFLAFLVYGPMMDPDGGGFPQSKVLPDAYHLPLFSAQMRIHGGIVVAVIVILMMFFFWRTKLGVKIDLIGQGDKIATYAGVNVKKTVMVAMLISGALCGLAGWNEVYGVQYRLLEGLSSGYGDIATIIALLGGLNPLGIVIASFFFSALLVGGATMQRMTEVPYSVVDIIQGLVIVFVIARTAIHFGLPQKLLRKGKKDAMLSSIFTVGFLVSLLAGTIRLATPILLPALGQIYTQRAGILNLGVEGTMTIGAVAGFSAAYKTGNLWIGLLSGMFFGMLWSLIMAWLSVTMRANQVIAGIALNILGAGTAVYVYRIIFGVQSLPPQVTPFAAVNIPVLSSLPVIGQIFFQHNILVYLSYVMVFVTWFILEKTTFGLKIRAVGEHPRAADSKGISVAGVRYAAVLIGGLYAGAAGAFMSIAYMNLFTESIVSGRGFIAVSVVIFARFMPVRAMWGALLFGFASALQMRLQALGIDMANQLMLMLPYIMTIAALIFASKKAEFPSAYTIPYSRLERMKKTTKIIIVLLIVIIAGITVVTSMKHAADGPSEVSAEKAAMAYAEAIDYQYENPAVIYEFMTDDFRKVMDKSEFIRAFKKERSYPYLTPLFINYDRVELNEDGTTGTAYYSQAARLPGMVYEVGLVYEDSNWHIKDFDDFLDGSYLDKFDTVTYDLKSYFDTEYPEDEETESGTEMSQMLIPNTVTEACQMLSSGNRVACAGATNLYVDREKGKYLDRDIVSLHRLKELSGIREEKDGWHIGSLTTFDLIEDVFRGQGSMDALAEAASLVGGPQIRNRGTIGGNILSASPAADTVPVLMALDAVLVLVSETGQRMVSINGFMKGPGRTAIHQGEILTEIVIPFKTGAARFRKVGKRNALAISIINVAVYMEKEAGRITALTIAIGSAGPTALRAFHTEELLRAWKRPDSEEKWQSLHEEIAIALSEDISPIDDIRATGSYRKTVADNVVLQLVRELWEACEKMKTLDFILNGEACHTEIPEDATLLKVLRDILHLTGTKEGCGEGDCGACTVLVDGRSVNSCLFPAVQAEGCQVMTIEGVEAHPELARIQKAFVDYGAVQCGFCSPGMIMSTVALLQKNPKPTEEEIRRGLSGNICRCTGYQAMVDAIQSLAMAAFLFIYQKDSKQSYQPELCICLNKPYQRFRSEVSEQIMNNFIMKGDICYSETSDTLRLCKDAYLICENGRSMGVFTQIPEKYQHFEVLDYTGHMIVPGLSDLHVHAPQYAYRGLGMDMELLEWLETYAFPEESGYKEPAYADKAYSMFVQDLKYSPTTRFCAFATIHTSATLKLMALLENSGLKGYVGKVNMDRNSPDYYCEESAEASLEATREWLMQSEQFHNVRPIITPRFTPSCTDALMMGLGAIASENHLAVQSHLSENLGEIDWVKELCPDSENYMDTYISAGLTAPGRKSIMAHCVYSDEREIQMMKDNDTYAIHCPQCNMNIASGIAPVRKWLDIGVHMGLGSDVAGGATLSIFRTMMEARQVSKLVWRLLDQNLKPLTLEEIFWMGTKAGGSFFGKVGSFEPGYELDALVLDESRMPHPQALTLRQRLERYICLSENGDLLHKYVSGNKIFMGIGKSIQRVDARAKVTGQAKYTQDLMTQPMMVAKVVHSTIANGVVTGFDLDEALKVPGVIKIVTCFDVPEIDFCTPGHPWSVEAAHQDVQDRRLLNQRVRYYGDDVAAVIAEDEIAAVKAARLVKVHYEEYQALVDVADAMAEGAVAMHDNVPDNILKHTSFALGDESFDEAVKEKGLILVDQTYDTQRVQHCHIELPVSFAYQDGNGKITVTTSTQIPHIVRRVIGQALGIPWGQVRVIKPYIGGGFGNKQDVLYEPLNAFLSLQVGGRPVKLELTREETFADTRVRHAIRFHMQGAVRPDGTLVARRVEAFSNQGGYASHGHAIVANASNMIKQLYRDEKALESESYTVYTSTVAGGAMRGYGIPQGDFAAECLMDDLATAIHMDPLAFRLKNCMEEGYKDPHNGITFYSYGLKKCIEAGKEAVHWDEKRAAYACQTGSRRRGIGMAIFCYKTGVYPISLETATCRMVLNQDGSIQLMMGATEIGQGADTVFTQMAAEVLGVTEDKVYIVSTQDTDVTPFDTGAYASRQSYVSGKAVKKTAKMMKEKILEYAAWKLKMDQQTLDIRNNMIVTAEGEELLTMEALATEALYSLERSVHITAEATSHCKENTFASGACFAEVEVDMPLGKVNVLKIINVHDSGILMNPKLAEAQVHGGMSMGLGYGLSEELMYDAKGKPLNNNLLDYKLPTAMDTPELNVEFIELQDPTGPFGNKALGEPPAIPVAPAIRNAVLQATGIGFNQLPMEPQRLVAAFKEKGLIMYDIGSFYEAASVEDAIRKLQEWLDAEIISGGSDVLIKIREGKLAGRSLVSIHNIAVLKGVIMEEDGTIVIGPGTSFSHITAHPLVQQHIPMLGYAVDQVGGPQIRNIGTIGGNVCNGVTSADSASSLFAYNAILELTGPEGIRQVPIQEFYTGPGKTVRRHEEVMTAIRIRRRDYEGYTGCYIKYGKRNAMEIATLGCACLVKLSWDKKVVEDMRIAYGVAAPTPVRCPETEKSVSGQAVSNALLLQTGKGVLNEVNPRTSWRASKEFRLQLVEELAKRAMAQAIRNGGGEVDAMLKIIHMNVNGKAVELAIDDRESLLDTLRNHLGLTSVKKGCEVGECGACTVLVDGEAIDSCIYLTMWAEGKHILTVEGLQSPTGELSEIQQAFVDEAAVQCGFCTPGIIMSAVEIIGTGRKYTRDELRKLISGHLCRCTGYENILNALEKVVGYMLTYSFAGTGSDSLYEHLYKCIRNDILCGNLSMGEKLPSKRNFAKNLGISTITVENAYAQLIAEGYIYSIPKKGYFVSDIHTILPVEQMHPFEEDNGSSSSIDSPSMIQKADMEESLHFAVDFTSNQTDSEYFPFSIWSRLIRELLSDSQQKLMINPPCGGILELREAIARHLKDFHGLHVSPEQIIIGAGTEYLYGILIQLLGFDKKYAIEDPGYHKIAKIYNSHNVDCDYIAMDDSGIQISELEEKNIDVIHISPSHQFPTGITMPIGRRYELLGWASKAPSRYIIEDDYDSEFRLTGQPIPTLQSIDVLEKVIYINTFTKTLASTVRISYMVLPKHLVKAYYAKMQFYSCTVSNFEQYTLAAFINKGHFEKHINRLRIHYHDKRDMLLQCIKSSPLFNHVTIKGEDAGLHFLMKIDTELTDEIICQRAAAKGIRIMPLSKYYYHPEKAMQHILVVNYSSLTQEQMTEATQAFNEILGMAENRYELNKQLAQMLKGGVIMDVTTPEQAKIAEAAGACAVMALEKIPADIRAAGGVARMSDPKMIKEIQQAVSIPVMAKCRIGHFVEAQILEAIEIDYIDESEVLSPADDVYHIDKTKFKVPFVCGARDLGEALRRINEGASMIRTKGEPGTGDVVQAVRHMRMMNSEIAKIKGMREDELFEAAKELRVPYQLVQYVHENGKLPVVNFAAGGVATPADAALMMQLGAEGVFVGSGIFKSGNPEKRANAIVKAVTNYTDAAMIAELSENLGEAMVGINEDEIALLMAERGKMTIAVLAVQGAFAEHEKKLDELGISWFEVRKKEDLDIYYDGLILPGGESTVQGKLLKELGMFDRLKAQIEKGLPVFATCAGLILLAAELGNDDRRWFQTLPVTVKRNAYGRQLGSFHTDAEFEAIGVIPMTFIRAPYIETASPEVKVMAKVDERIVGVRYKQQLAISFHPELDNDNRLHQYFVQMVSSSLNKEKMNEHILSKMADPIHNFHLPRYQEIPDVGLYLEQTAKYIDSYLSPLEDISITGSMISNYVKKKIINNPVKKQYNRDQIAALIFIAVAKSVLSLDNIHMMFEIQRQTYDNETAYNYFCQEFEQVLWHVFQLDMADARKDTDHNTKKEHGTFSNEKTMLCNMIITVAHKIYLDRYFSLLRDEDTIMRTQTLTKQMYTASLDRDRDFHFRVKDPGSAATHFIGFLAAVLMTPVLLVHAAGNGADFMTMIGMSVFMISMILLYGASTSYHSFDISEKANLRLKRLDHMMIFVLIAGSYTPVCLTVLRGSIGMRLLAIVWGLAIVGMIFKLLWVTCPKWVSSVIYIGMGWVCILAMPQLLAGLSFGAFMWLLAGGLFYTVGGVIYAMKFPVFHNRFRYFGCHELFHVFVMAGSLCHFVVMYAYLCSMFGPFDKYFDFDHDGELSGFEKAAEIGYLNREGFFSDPTRDISREVDMDDDYDQDGYDGDDYDRDDYDDDYDSDDFDNDDFMKGFNTSDGYMGLVGGKYILFASEDDYYEYMNDMKNDTRKTVRGLLIAGVVVMAVSIMWPSLAEKYGTSKQTASNVLQSETSSSYSSSSASTSTSASKSTSASTSTASATYSHSAGGGGGSTGSFVNGASGTSSGSYSSSGSSSGSSSYKKNSGYTSSYDRQKKYDPYDAYDYDDADDFADDWAEEFGDGDYDDGYDDAYDYWEDEMDDMFYLVIDLEMCRVPRDYRNKAYHYAYETIQIGAVLLNEEFKQVGTIREYVHPEHGVIDPFIEKLTGIKNSQVKKAPCIGEALVHMIDWIGDREYKVYAWSESDRNQLLHEITAKQITDESVDAFMMEDRWVDYQMVFSQRFQLTRCISLEEALGRADIDPKGKFHDGMDDAVNTGLLVEKLEMNPDYQLISYEMPEKPSEHLGSTLGELFAGLNLKLAMLMLTAVVSFLVLSFAAACRGDFSGFGMIAEGILYIAGILLMCWLFTQPVLLGILIVIGIVIAYASYRNKKEIEMTKIYFTLTGTRHYYGSDFLKSGMKIQLEKEPDNKYDPEAIQVKLKGMGKIGYVANSPYTMIGESMSAGRIYDKIDNQANAKVVMVTPNGTLCKLSKKSLVSYTVNEKAEKKEEEELSFVMTVTWTDAIVFAFAWSCIWGSLLVSHVLDWKFEWMQPKLWFLYVKRNLAHSKEIFFKCSELPNKIHKPFEDLINVFETGNLQSPDLRMDQSFRRKFEHEIHLLKKNNIRREMRMAYLKLPEEYIKKNDFKHWSDAGREWREVVLQGTILNRYLDRKNNRILYEDFFAHGAVLLRQSRHIRHNEVGSKNRNDEQIFYSQYTNVICPSCGATVTLTSDEDHCPYCGGYIKSDFFDWQTEEFLIYRDYNPNTRNFKLTAATMIAFFIPAIPCFRFILPHSYFLALGSAFVITALLALLLWLRILRKTDNIEDLKKQIVRYDEKVLHSDLNEALYEKTVSSELLYYSVDQLQLQAVENTDTRTQITLHAILHQLILSPNHQISASNQPIDLKLYRARYPQRMKSKGQAVYAEKECPRCGANFIPDQDGCCSYCGYRLPIDNSKWRILEQMLKKIAGVLLLVIGLFFAVSSLKMIFVDTPKMKSALKDAVYVGQGAINDANDGKIVIVCGPFELTTPSYDDELGLTIDSIRTSRSKQTMKLNKATKATKANAETLTEEEKRNGVLEWSTAYRDKTLTGEGKIGNYTLSQDFIDAIVLNGTWHDYDRSELEASGYVWVTDANYSQKDFIEPLSQTQRNYKENDYRYFYDGANFKTGQTVTAIGIQNGDTLNAVAGITNNLMENELDRETAIAQGGVPGLGTSVFSIIFSFIPLLAGVVLLFTSGTRKPMKKNVQWLVIFVFALLLLTGCKGSEQETQKKNGESEDVSSKVEAFLKKETNQSSEATQLLTETDASETADMQSTESMTETEVTAWDELQGKMHENDCNIAMAFLGYISYEADEVKIRQYASQEACVQYDFPEKADLVDCGGEEVYAIVPRAGMSVSVYRVEMSEMGEYDDKLETSLYEGKKGEPILLRCNVSEIFPDVLLIVSDGRTMHLFRPMISLRDGHLAAEEGCYDFSVYEPLPDDGGEIGPFDGQNWDIAYEILNEVPEVREAIANGMQIMDTCEMEEIDGRPCRVFVLGTNHDGQFVREQYYAVSDNLVYVYDAIDDCWLIPDRNMGLIKAFVGAAEGTLADQWKEFFYCDAMDKSVMVKKGQKRTGVRSSNVHGNDNIISNGSGIAVADGQCMIIVEQGKVVEVCAEPGQFTYDTSTEPSIFSGNLGDSIKASFATVGKRFTFGGDTGKDQRIYYFNTKELIDNKFGTPNPIPFRVVDSKIGLDIDVSVRCSGVYSYRISNPLLFYTNVCGNVENEYTRDELDRQLKTEFISALQPAFGKLSELELRPNQIVTHNTDLEDAMNETLSAKWGELRGLKVVSIALGSVTLPDEDAEMIKQAQRTAMLQNPTMAAATMVGAQADAMKAAAANESGAMNGFIGMGMAMNAGGGMNAQNLFAMGAQQEEARRQEEMRRQEEARQQEEARRQEEARRQEAMRQQMAAAPVQQQNADSWTCSCGYVATGKFCPECGTKRPEKPTGWVCSCGALNKGKFCSECGAKKPTEEPLYRCDKCGWEPEDPKHPPKFCPECGDPFNDADIQSMQNMQEYKCPCCGGAIAFDSTIQKMKCPYCDSEFEMETLQAMDEQLKEGKSDSMEWETKAGGEWQEGETDGLSTYVCQSCGGEIVGDATMAATKCPFCDNPVVFTGKFAGALRPDLVIPFKLDKKAAKEGLMKHISGKRLLPKVFKDQNHIDEIKGVYVPFWLFDTDADAQVSYKAANIRTWSDSRYIYTETRYFLVNRGGSIGFEHIPVDGSSKMPDDLMESIEPFDISEAVDFQTAYLAGYLANKYDVTAEESIDRVNARVKRSTEEAFAKTVKGYDSVNVENSNIQFRGGKAQYALYPVWLLNTTWNGNQYLFAMNGQTGLFVGDLPIDQSAATKWLLGLTVLISAMSYGVIWLLHLFGLLMKKTLRMLLLVLVLCVGLVMPAAAETTDGFASDHICMVDMAGVLNEQEVTELEMMIDEIRTRQKFDIAILIVSEEDIPSMEEYADDIYDGADMGYGQTRDGVLLVVDLKSSECYMSTKGYGITVFTDAGIQYVGQQMRPELADGDYAGAFRTFATLCDDFITQARNGKPYDADTLPKEPLSLIWIPVAIVIGFIIAFVIVGGMKKQLKTVRFQAKADDYVKAGSMNIVDNQEWFLYQNIVKTEKPKDNDKSSGGSSTHTSSSGSVHGGGGFKFMKRSAVVLLCAILALSSAACGKTGPDVPRQTEAMYRTYEYAYGNLNIQLPEDADDPEDKGTSLLFTDPENLWTLELKPLDVQNTKIEISNLDSQITPEHAYFKDVQENEDPYQDFAAHFWSLNFNMDNPGGMSMYYNEPKAFQVIDYGDTLVGQWGGLKLELTGLNKETQIQDILADPLVRCIWDHLSFQVTEGGGLTENVGISAEFPARWNNTIKETGICTNFQGDRLGYLSVTAVKPADPEEAAALCQDDIEEMDFGGLHYYVTVKTFGDGEDASEHLRLYTKFTDDYAVCVEMASRGLVGDELWELLNDENISNILNSIRLDPSGFKDPELKYTNADGFKCNEIGYITEYTGTAEEVILPQTIGDVTISDMENALFKGHTEIKSVIIPEGYEVISREAFKDCTSLERVEIASSVTYISTYAFEGCTALKEVVFNEGLTEIAAYAFDGCTALGDITLPSSTVAVGAYAFRNTNTSVDGATFICKGNAVFDTWALAESGFKTVQFLGNCDLSIDAVLGYAKVENLTIGEGTEVLGSNFASTDFGETTPLTVSLPESLKEIGDGAFSQREGLTEIDLKNVEVIGEDAFAYTGLKELLIPGTVKEVGAAFDSCIQLKTIRLSEGVEAIGDEAFSFAGSGNGSEGEYVTYLTDEAYEKNKAYVYQEDEKAGFVNVYLPSTLKRVGANVFYGAYVDGIYMEWCTSPDALPSFDPTFVEDKVAGIHQIYFTKETIDAYGDELDAYFMNTNAKDCCWYPNGQKAYWSSQSLEMSYKKKRALSYVVVACLVLIASLCRHEQSENMYVSHLFEQCRSSIYIGLYCAWVVYLNKHVVERKMRKCLTWIGCLMVFWFLIRTIKYLIIVDSFGSRVCWYLYYIPMILIPTLGLIAALLMDEGDEVKTKKQTVCLLIPASIMILAVLTNDFHQKVFYFPEGFLLSNEIYHYGLVFFIIQAWMMFCMIIMEVVLVCKSRIPGKTWFWFPIVPGFLLLVWNVCTMLRLPLIKVIAGDMTATCCLLMAAIYQGGIACGLIQTNNRYIELFQAAGGLNAEITDANFERHYQSGTFPNLTQEVRQGLLTAPLVMRDGIRINHLFVQGGHLFWTEDISLLTDQYEDIKEQQEELKARKRLLQKTYQQEAKRRKAEEQNRLLNLIQSQTTGQLELMTHFMEELEVTESKDVYERLLAQIIVIGTYLKRRKNLLLTMNNDSQAGLTEEDLIQSLAESCSALKLCQVRALYYVNVRPLVLHDAEIVQCYDYFEWLTEQLFGKMQMMFFRVVVMEEHLVISVHVDSEYDLQTLLSGRSGTEVQKEDEKEWLIRWRILMANFVESSVGIQNCVMIMMEICMAFEMMLILLCVTRFEGLKRIILTVILFASSFFMMAAFQNDHSYSIGKRMNRHVMLPDIPMVLIVCAVTGLMLYLIWNFLGERRREKTLFSQWSVNDAVDNAPCGVCFADTFGRIVLCNSMMWEMSRMLMGEKLQDYDVLHQALQHTGRIAEGVVSMSSTDSVFCFPNGKIWMFQEYLLKDQELAGYKQAIAIDVSELYYNNEKIKANNERLQSLNRKLEEMYEKIGERIREQEILAMKMQVHDNFGRSLLTIRKILENKENMSHMNKQLDVLKEQVYILTNMTVENLEDLYQNTGKHARELGIEIHLEGEAPKNSTYRLLLDRVIRECVTNCARHAHGSDVNVTIEEDSEAYSIRITNNGELPKPKAREGGGLSSLRRALESEGCTMVTVFEPAFCLRLRMPKRQSEMIRVLVVEDQKIMQKYFEYMLSQEPEFKHVQTVADAEEAVGICSYSAIDIVLMDVQTFHNHDGLKAGKAIREACPHTKILIVTSLIDPKVLERAKSGCADSLWYKDHGEEEIKDVIRRTASGEHVFPDVSPDAELNWITSGEISPRQLEMLRLYICGFSYSEIAREMNCSTAGVRWNFQEMIMKAGYSCKEDLIAAALESKLIVTTLKMRKRLSYLLVVAVFVSMLSLSGCGGGGGTTKSEANPYEGKWVAVVAEAMGVQLPIEECFEGDLSFELNSGGQVVFHADEETGNGKWAVADNKLTITIQGEEMVADVGENTFTFDNLMDMGLKVIFGKEGTDATNPENYLTEDELALIGDWHSETVEELLGDGPQTTMDGVDNINDALRLTFAKDYTVKVVYKGQEMGTFKWSLVYGLCNVESENPSVYVATNEDGSLNVDYSDDEDFLTFKCVKDDAKMGLFDKKYCDICGEKIGLLGNCKLDDGNLCKECAQKLSPWFEERRHSTVEEIKRQLAYREQNKELVQKFNVTRQIATKTYNVFIDDIQGNFTIAHKLDVKENPDIVPLSAVLQCKMDIEQDRKEETYTKDGKTVSYDPPVYKYEYQYRMKIQVRSPWFDDMDFRLHNFSIEQDDRAEIMEIERAGYEIVSALTGQAPMGMQGMNGMPVNNGMNYGMQGMNGMPVNSGMNYGMQGMNGMPVNNGMNYGMQGMNGMPMNNSMQGMNGMPMNNSMQGMNGMPMNNSMQGMNGMPMNNSMQGMNSTQMNNSMPVNNGMQGNQQMQQPGGTWKCQCGAENKGKFCEYCGQPRPFMWNRQELKSNARIMLKANYLKIVIVSVVFALLTSSGYQSAKGAAKGSDADISLSHLTDIQWSLVMAAFVGIMGVVIIAFLVNALIAVFVWNPLSVGCIKYFIDCRYGNAEWKDILFVFRNNYVNVCVNIFLKQLFTFLWCLLLIVPGIVKAYEYMMVPYILAENPDMSREEVFALSKQMMKGNKWDAFVLDLSFIGWMILGALTLNIVNVLYTNPYRYLTSAELYHTLKMKIKIVKKLKAKMNRYLGRVADDREPDRKRSDDCFRERMAHGFWQIERMAIRNGEFFYWSAETIVLLMTMQDVLEMMKCIREFFTVVRLESGYDTMDSEETYCEIEYLKEDIFFVKAKRIEIDGKPYVIKIKQEVDEKILQALLESDQIPERLAYYNEKIYHDSLTGAYNRRFFQEKMISVSKNTGIAMIDLDNFKAYNDTYGHHAGDLVLQTTVMTIKSVIRRDDILIRYGGDEFLLLMPGMQSQVFHQKLLQIHQFIYQSEVPEYGKMHVSTSIGGVIAQGEEIEQAVERADKLMYAAKAQKSCVVTDVDEEVLMKKVPGWKKIEIVCVIIVVAFMSFLIGIYYQSRTERGSIRSLCSGWYQMKDGKKIELELPCSVTEDAEGKVILYNDTLTEDDRGLIVSTRGIQDNLEIRTGERILYHYADNQFQKNKQMKGKMWADVRLPEEMGQEPLCFIYEGTAGRSLDIQVPILGSFSTIVVRHLQASAFSILMIISMLGLGIVAVSIFLYTRHRQLVEKRFVNVAVFLIICSLWCILDSGIYQMYGKHSAAGSLVSFYAFMLMSVPMLHFIQNTVSKENQWIPEIWILLFYGNAIGQGIVNIWFAVPFKNMLFVTHLILFTGVAAMAILLWREYQKHQTQELELCLKAFGVLGISGVIALALYWMYAIYWYDALFQFGILLFISFLFWGLLCKVSNDIQYRMEQAVYERMSIEDRMTGMKNRKAFEQQLDQLQQDVMLLENALLIFIDIANLKTINDTYGMQIGDEAVIRTARSIQAAESDACEQHTECFRIAGDEFAIVVTRPQKRPEEWEQMIRNEMKKESGSRYPVQLEFGCSYLRKADGTLLSISDWKMQADRMMFSYKMIYNMDFLISAMVILLLILWHFLGQKRAEDLNNRVFLFFAVLGTADVVAEFFTNYYITSYNSDMENAAVIVTTIFYLLQALLPVTFIFYIQTLHEQKIISAKKMFISGVPTLVLISVILTNPFTKKLFSFDVTAGYVKGPWYLLMYVSALGHFAAALLLILLWRKKLGLQKEKILLEIFVISGVGVVLQMFCQSLLMTGFGMSLGILALFITINNPNANLDSLTGLYNHLYLTRKMGELIASGKSFHIITVYLYQLKHINRVAGVQGEILFCSRMQQIAGQLGALCGQKVTRITGKRFLMLTSSLEEYEYYFAKLKRLFDVNKVLDVEDKNIAVPVIISGIINAQKLEESGLIMEYAEYLESLTPQSGLTEVIQDDRQTMNGFMYYKRVEQYLHKAIEEDLFEVYYQPVYSTRERRFITVEALSRLYHPELGWIAPDVFIQIAEKNHMIEQITDMQFRRICRFLKENRELMSRLLNVKVNLSSLDLMRNDCSSHFIRMMDEYEIRHEWIQFEITETVATEYSASLGMVVDGLTAAGIRLCLDDFGSGYANLNTVMRLPFSTIKLDRSLLFDICNDEKRAQFYQSVVETFRKMNYHIVSEGVETREEMELISRWGVDMIQGYYFSKPLPEKALISLMQTETMSASVNGEQSEKVMKTKAKIMIVDDAEMNREILMVILGDEYEYVQAENGRQAIHILQQDMNIDLMLLDINMPEMNGFQVLDRMNTFHWINDIPVIMISSEEKKDVIERAYILGAEDYIRRPFDAFIVRRRVQNILNLYANQKRLMQMVADQIYEKEENNNLMIGILSHVVEFRNSESGEHILHIRTATELLLRRLVQKTDEYHLSESDIVMITTASALHDIGKISIPESILNKPGKLTREEFSIIKTHTTIGADIINQMTTKMEKPLLRIAGEICRWHHERWDGHGYPDGLIGEQIPIAAQVVALADVYDALTSKRCYKDAYDHETALDMILAGECGAFNPLLLKCLQDIAPRLRMDAQYDAGDSLYRSEADRLTTEIMNKTEIPSSERSQHMLESMQERMNFFASLKGGIQFDYDSVSRLVNVTNWDEPPQYRYTVKNVADTNCFTCLSQKDFHRLKDALDATTPENREFSMSIMMPKENEYEWCDMRVHSLWSDLSPEHYIGAVGQLVRPQEVSADIPILDGLAESDTADGMAVKAIVDQLRKIFDIVRLVDPTANAVLELDHNGTLRKTDQHCAAFWETGGNCTNCISTRALSQKTMLNKLEFTKTDMYYVVSKYLCINGTPCVMEMLSKMNEGRWIDANGTRFLLDKSRGESRKLFLDPLTATYSRRYFETYLTHMEGMECVEIIDVNQFKQVNDTYGHPAGDVVLRDIAAAIKSCIRSSDILVRYGGDEFLLLFPKMSEKDMAEKNKRIKEAVANIVFTEYPTLHLSVSIGGVCGVHPIMEAIRQADKRMYENKRTSMNKICKFLTLIILIVVVLLFGIYQYRTFIQTEIYQENSEHLLATYEQVNRTFTLFTQRNWNVLSDWDEYLQCISDSENTETVWHDFADRKNNWQYSDFYMFNEHCDFLTANNRKGTADSIRNCFQEMYSSECPTISDYTASSGKHKVVFAIPLSHPFCLNNITYTGVAVSYDVSTVEDMISNNVYGDKSSCYLVNAKGHVILSLESQSEFLSGHENLFTFLKDNAVFSENTYDAVEHDLQKVVKGRAKFNSQGTSYYMVYQPVGLNDWSILGIVQTAAVNSPDEKIMHVTIAAITVLATCLLLLLLRLSSLNAEYKLKHQELLHQALKAQKEQTNQLFYGMTCIVDRYTVVDLLKDRYEYHEYSSNNLYPETGSYQNLLDTAARNYIVLSDTENIKMSHLLNKEYLQKVLHKGNGIMKIEYSKRTENVYKIMNVVAVEWDEAGIPQKVMMISQDIGKRHELENLANTDGLTGLFNERYFSSVLHRKEQKKLPFVLYYLDLDHFKPVNDTYGHDMGDKLLKAVAERLLKCIRSNDLAFRIGGDEFALIISAEMEDSLCMQTKMRIVQSLLLPYEIDGKTLHIGASCGYAVYPLETEDTGKIRILADQRMYAEKKENHRKAAESQSKDPSQNDMISSPEEKSLPQKISEDIITFIFEKKLQPGDKLPNETVLSEHLNAGRSSIREAMKLLASRNIVTIRQGSGTYIASSPGVVQDPLGFTFIDDKQKLIHDLLEVRFLLEPSIAAMAAAHADENDIKKITALCDETEALLKRHDDHTQKDIEFHTAIALSSKNVVVPRLIPVINSSIPLFVETTSGALHEETVETHREIADAIAGHDPLRAQDAMYLHLVYNRKRILLIEKNTDQIMKKITVKRSDVFGENETSDELRRQKQKDGRDFSYRSCHAKVIDSEHLQKNIHLSIKNHKAIRISIVTTMYESMKKLTGILMAVCLTAALIAGCGQKAGRENTQTTGNQSAAQTESQTAGNQRETGDLSGDEVSAAQHCILLAGKNGTWLLADRDNGTVFTTSIPNDLKDNDGKKITSEILKAGDYVDVYGDGIMLESYPGQYPGVSKMVVTGEGTADEVKQYQDVIDMVFAEPDTSTVPTVGVVYSSSLGQTMSLMSGPGNSTWTAPSGDSETDSSEDNTVTACGSAVMQWKNLEKMSMDAGKTDFTISCDLTPTKVTVRRWNSDKYPASVDDDLDALAEEVNVEKSADGEFVVRDVEPGYVYEVTVSWEYGDAQYGFMTSEIQMEREIKLVALDLDGTTFNSEKVITERTREAIAAAIKKGVIVMPATGRQKTGLPESFTSIPGVRYALTSNGGAVVDLWEDSIIYADFIPYKTACRVIDHLIQIDALIEFYHDGKSYADRKSYNRALHVYRNFPDWFKEYIKVSRIPVDDLRERVYSGKFNIEKMLASFDDMILRQQLFDEMHNDPELSVVFGNSFNVEITAATANKGHSLLKLAGKLGIMPEQIMVCGDTMNDRTMFEAAGLAVAMGNADEEIKAMADDVTLSNDEDGVAAAIEKWVLMQHSLNHVRMIATDMDGTLLNSQDQMPRDFFDILNQVHKLGILFVIASGRPYPTLAMQFESCMDTLVFMAENGGCLVNGDKLVHQDILDTDALSYLLGRCRQVPGAIPILSGFKTAYLFDQTSDDARKEIGRYYKKVQYIHDISEIDAPVSKVTVCDFKGAESNSFPALSDVRAPFKATLAGYMWTDLSLAATNKGCGLAALQKNYGISPDETMVFGDYLNDYEMMKQGYFSYAMANAHPDLKAISNFETLSNDEDGVLYIIRQLIHSRQMEILTGDIVRLKKKHPCGSFDWEVLRSGADFRLKCCGCEHQVMMARKLVEKNIRRLERNGEEMKITRMNKYELAVVLTTKIEDEERAASIEKIKEVIARFGGVVTNVDEWGKKRLAYEIQKMKEGFYYFITFESDSNCPNEVEQRVRIMENVIRYLCIRQDAMNKVILMGRLTRDPEIRYSQGERSTAVARYSLAVNRTFKRDGEPDADFINCVAFGRQAEFAEKYFHKGIRIVITGRIQTGSYTNKDGVRVYTTDIIVEEQEFAESKAASDRNSSDFAANNNYGGGYQQSGRPVPSQAPSDGFMNIPDGIDEELPFSMPYNKEEGRGTQMKRRPMRRRKKVCVYCVDKNAVIDYKDTNKLKRYISERGKILPRRITGNCAKHQRKLTTAIKRARHIALMPYITDMSREVVIVAYGRSAVCKSRKGSFAGTHPIEYSAQVLKGVLDKVPQLDRSEIEDVIMGCAVQHGTTSMNIAKSVCARAELPECVAGHTINRFCSSGLQAIATGANAIACGQGDVIVAGGVESMTDTYAPYPVEFQDAWLNEHAPGAYMGMGMTAENIVKNYGVTREEMDRMAYESNMKAAKAQKEGKLAPSIIPVTVVDKDGNEKVVTEDEGIRPTTTMETLAGLKPCFIPAEEGGTVTAATSSQTSDAAAFVVLMAADKAKELGIKPIAKMVSFGVAGCDATMMGLGPIYAVPKALKRAGKTIDDMDVIELNEAFAAQAIPCIKVLKMDPEKVNPYGGAMALGHPMGATGAFLTCKALDYLQDNKKTTALVTMCIGGGMGAAAVFELLMKVADIKNVAGIGGGVIGGSWAVLFAMKGLNVKLYDINDDCLANDKKTIVSNLEFLAENGAIEDKDAVLARIQFTTSMEEAVKDAQFIQESGPERLPIKHSMLAEIEKYAPVDAIVATSASGLPLGQITEHAVHPERCVGGHPYNPPHLIPLVEITKTEKTDEANVELAKEFYESLGKEAIVLKKDCPGYICNRLQLAVFREMVDLVERGVCTVEEADKALTFGPAIRWAIFGHNMIMQLGNKDGLKGMMDMLAGGFNLCADIAAWDTIPADYGTKAQKEMDEIMKNLPDEVGHTNAEIAQYRDKMLIDILKLHHKFMLNMNGPVKMASYDMAGKTAVVTGGTKGIGKAIALAFGQCGANVVVAGRHEDECTAVAEAITSAGGHGKGIRTDVRNIDEIDALIAGAAETFGGVDILINCAGVAITKKILDLDVEDYDMVMETNLRSVLFASKAAAAVMKASEKGGKIINIASVGGLKGTSALSLYGASKAGVINLTKTMALEWSRYGIQTNAVCPGYVVTEINKAEFENEKFRDHVLKTIPQRRLGTVDEVAALVLFLASDMSGMINGEAIVADMGAICGMSEMKTTSAKKTSGYNFGLKGWRIIGFEIVMLFFMTGITVDGLNTIVPKMAAYHNWSSDVLLSISTPASIVALFACVMWAAFIEKGGLKRVTLITMVLAGISLIAYGNSVNVVMYAISLVCVVTFINAFACNCGFAIVANWFPTKSGIANGIATIGMNLASAIINWVLTGLSNVFEITGALTVLGIVLFVLAGLVALFVKGTPEEDGCYPDNDPAVAEMLKNEEMPAEIGSQFSYKDAIKNKYVWMYGIGNGFFGLATVGIMSQLLSFFQEVRGYDASSALTMLTIAAVIGIAGAWIWGAVDQKLGPQKTCLIFGIWYLAGIILLISPLKIGMYVGLIMLGASIGGNGQFGPVLAAQAFGRKDFSVSFSCMNMISGIVRSCSYAVLAVLHSMSNGYSAPYTVFGIIAVVGGCMIFAMKEKKKEDVDEDTVVAYMNTHAYTPMHIQNLINRTAMEANILPLNCYTIIITIIYRRFFMSHKTVICFAIWTSFWSALFNHFYTVYFGSFGVPWIMFVCMAIYFGMGGAPKQVPGMILSAFCGLAWGQFDFILINFFGSTCHMSAEMASFVAILVGTAITMYIHIKLLGATPLGFMPFIFAGVCLTFSQGGSNVAGLAFTLFVGIILAMICGLGLTYCTKKFDTPQITKMNYVNTVTGPVAASELGRTLMHEHFLFGFCGFQGDATLGGFKEEEYTRDCLKAVDDARAYGINTIVDATTNECGRNVRFLKKISDMTGMNIICSTGYYFQAESAYAYWNFRRGFANIEEEIYEMMVTELTKGIEGTDIKAGVIKLASSFNEITPTEEIFFKAAARAQKETGCVIITHTQLGTMGPEQAQLLIANGADPSKIAIGHMCGSTDVDYHEAVLKQGVYVNLDRFGLEGELFHTPTDEQRMDLIKTLSDKGYGNKILLGHDSVNVNLGRGLIMTPFMQEAMKWANITDIGARVLPGLAKRGMTEEQIDALLAANPMTIFGMSDNKKNVDLNKVSYNFGTKGWTVIGFEIVMLFFMTGITVDGLNTIVPMMAEYHGWNPDVLLSISTPASIIALFACVLWAAFIEKAGLKKTTIITMVLAGISMIAYGNSVNIAMYAVSLVCIVTFINAFACNCGFAICANWFPTKKGIVMGITTIGMNLASALINWILSGLSGQFQISGALSILGGVVILLAILLGIFVKATPEEAGCYPDNDPEIAAIIKAEEEGVKEMEKVSYAGALKNKYVWIFGLGAGFFGLATVGIMSQLVSYFMAARGYELTGALSMLTIAAVIGMIGSWAWGVVDQKLGTQKACLMFGIWYFIGIAFLIAPPTPCMYIGLFMLGGAIGGNGNFLPSLAAQVFGRKDFNVSYACMNMICGIVRSCSFFVLAVLRSMTSGYTVPYVVFAVIAVIGGILIVAVKEKKAIQMAKVVRRCYNSTSECRDNRRKTFEPERGLENNEKEKKVKVYYIDEDIKGTCFLVQGEQEAILFDPGMAYYGETVVQRVREILGTQPLRAVFLTHSHYDHVAALPYVRQAWPEIKAYAAEYACHIFEKTKAKQMMFHMSKTAAEESHHEWKSDDYKGELLYADKPLEDGDRIALGEFVVEVIETIGHTQCSVSFLINDEVMISSETIGLEGDFEGGYVPAFLISYKKTVDSLRRTREADPKQLYMPHRGLVIPDERYWKYMEKGLAATKDEIIRILASYPTLEAQILEMEEVFWKKAADGAWPREAFDMNAKAMLRTVAAEFPEELGMCNNKPMAPYAKLPELEEYKEWFKDFADLYREDGILQVTWKTNDGPMHHSGMSHRAISQLVRVLSLDFKNEIIIFTHIGDSWMVESDPNGWETYSELPTQRFQHQYFDDTNLIKNMVFDLDVPTIGAVPGPGFHWDSAFLSDVTICTEDTVMEVPHAQGGLVPGDAMGLMCQHYFGTKRGNYYMMTTRQFTAKDMLDHGMVSEVVPKGKAVERAWEIARMWKLMSYENRTIMSNLAKRPLKKLLVEDLKLHTVSEQYGSLLRVAAGDLGDEHSAQQDEKYISRIADYRYATTDMQEPMTAEHWAGMADRAAEWFKKVDAGEIENPFDPKKPVKPYRPAPSKKLSKMCDNKPMAPYAKLPELEEYKEWFKDFADLYREDGILQVTWKTNDGPMHHSGMSHRAIGQLVRVLSLDFKNEIIIFTHIGDNWMTESDPNGWETYSELPTQRFQHQYFDDTNLIKNMVFDLDVPTIGAVPGPGFHWDSAFLSDVTICTEDTVMEVPHAQGGLVPGDAMGLMCQHYFGTKRGNYYMMTTRQFTAKDMLDHGMVSEVVPKGKAVERAWEIARMWKLMSYENRTIMSNLAKRPLKKLLVEDLKLHTVSEQYGSLLRIAAGDLGDEHSAQQDEKYISRVNDYRYATTDMQEPMTAEHWAGMANRAADWFKKVEAGEIENPFDTSKPVKPYRPAPAKKLNKMDINRLNEFITLATLLNYSKAANQLYLTQPALSRHIHDLEQTLGTQLFIRDTHNVHLTSVGEIFLKEAQEIIQRYNHALDLIKEVSSTSTGELKIGFLGTASQSFLSDFVMGFTASHPQIKLSMTSDALDILVKQLNDGLTDLAFVTHVDKNYLIGLESKTIMKSPLIAVMHPTHALANRDSLSIKDLSGFPMINFSPQANPITSDFNKQIFKKAGAQLNIVREIPNIETAAFCASINEGVFIMPEYLLSSIGSLRTVPLTDSFAYVTLNLIWKKKNPNISIPVFVDSFSTYIQNRNPNLAPADMHCKCGVRNYNNNCKSIQEEDKVLGKRCVICAFPSRWYMGDGSKVRMVAFIDKDDMNDVPDRVYKYGTYMAKDKKAVVAIAKEPTVQESVTKVFDLLGGVTNMIKRGETVILKPNAGHAEGPDTAVCTSPETLRAVIREVKKAQPSRIIVAESAAIGCDTMECFEVSGQADVAREEGVELYDIKAEKDLVNVAVRGYKSNIKRCKIPRLLLEADHIINLPIMKAHASMVFSCALKNIKGTVQDQVHSQMHQQNLTMAMMDVWWAVRPDINIVDAINVASGYSPHTPTPLEVGIIMGSYDPVALDLIACDVVGIDTNQVDYFRAADEAGLGTTDRDKIEVVGEQVKDVYKKMWIPYLGNMADRWPEYDIRCEGACSSCQALLALNMETLKALGIYEENSDKTIVVGPRNTIPDKPKDKIILHGNCTKRFADKGMWIPGCPPGETGLYLTIKTGQVVDGEIPGCIENIIRPSMEADHPKWRAYVEQKAKEFYENPENQMAFAYVPMSPDDKKLLEMIFTDEFMQAETNFEAFRDFQSSSAVFTNWKSDIMVYNEEVFDGFVRESTRFTSWDEMVRTAADRAFSEKDEMYDGAQMIQPDQLRELDPTEIAILFNENDTQDRQSTKKEIIQKYRDHLKSAAIMEDGETAYVLLGIENQTDVNYAMPVRNMLYDALQYVRQVSRIADVHRSQKGKAEHKNATGAEFISGFHKNDKLIPVITLVLFFNADEWDGPRSLMDMMEITNPTVRRLVGDYPIYLIDPRSLADDELKKFHSSLREVMGCIKYSNDKDKLAAFISHNPRMNMEVEAARVIEAINHVPIRLEKGAEQFDMCKAIEEMIEDGRQEGREETLMRINQLIIMLSKENRSEDIVKAAADREYQEQLLKEFNLMDNRRFIARRAAQYFNEGDTVNLGIGIPSACSDYVDPTIAFQTENGMIGVGPVAKKLAICDTYQNAGGINFVPVMGASAFDTAYSFAVIRSGRMAATVLGALQVAENGDIANWASPGRAFGMGGAMDLCNGARKVIVAMELTTKKGEPKILKRCTYPLTAQGCVNHIVTEQCVIDVTPEGLKLVEIRAGKTPEDIQAQVEPTLIIADDLKIMDEEMEIERGKVRTREEIMACFKDGQTIAIGGQAGAYMPWDLLDMLEESGVKHLTICSIDACNPGFAIGRLIENGQVDKMITTHIGTNPVAQKLLAEGKLEIEFFPMGSFIEKMRDGGAGIGGFLTKTGLGTDMEKGKQIVTTSDGERYILEEAIHADVALTRCRRADPLGNLAYHGTGTASHPVMATCADISIVQCDLYCDLNEISPDDVKVPAMYVDMLYTDSHEQNHIIGRIKRNQLEGMMNLYDTHTMKRGAILVDVCGYTGEEDFYAMHKIIDEVIKPEDSGFSVDSMCIGGYFNKDGILVRTSSESPYDDLSFFYEPNKMSEEDVKKIENWVDTVVKELHARLPRMPAKAGIMTFGNGLENAKKYQYNVNVIERNAAHFGSRAVQLMAKTIITAALTGAITPHGYDVPETPEEIAKTAYECWKAGAAIVHLHMRDDNGAGVMDPVKFYETIKLIRKNYPDCDVIINCTSSGDNRVSDDSPYGNAVRMLHHANVPGIEMGTFDAGTFNWGIPGGIFSNSPTFLTTLGNLYQERNIKPEFEVFDMGMIRAVGVYWKKGIVKAPLHFQLCLGVVGGLAATPADVQDMLAYIQRLQAEGNLPKEVTVSGFGIGKGHLPVMFSALANGCHVRVGMEDNVVYGYDKEGKKILANNLMLVERAARAVEAYGNEVATSAEAREMLGLAPLDHEAVVKALDALTIEDLEKAKAEASEKYGTTYFAAKSMGMLLEIILAIIPIAWLIISMAGLKMAGYKSCGIGLVIAIVEGVAVYHMTVPEAITGTLEGVVSAVWPICVIIVGAMFLYNMSLRTGAMDVIKAMLASVSNDKRVAALVIGWGFSNFMEGIAGFGTAVAIPAAMLVALGFNPVTACVICLIGNAASPEFGAIGTPTLSAANTAFPTTITGAADASVFAQMLSEPTARLLIPLCVVSPFVIILLCGGTKALKGVVGITLVSALSFVIPFYLVATFVGPELCVVIGSLVCLVCTIVMGRKHTNIPEEYMLESKEEAAASSDKPQMSMVKAWLPYILVVIFLLGTSKLVPPINQFLGQFKSSFVIYCGEGGAKVGLSWINTPGILMIIATIIGTAVQGASISDMGAELGKTFKGYWKAMLTVIFIISIAKVMGYAGMVMDLANALSSLLGNAYIAIAPLIGGIGCFVTGSATSASVMFATLQQSVAQQLGINEIWLVAANGAGATAGKMISPQSIALGVAAINLPGSDGKIMSKTIGWCVLYLVILCVFCFVGAMNTAIFFADGFEEIEGLTVVDMFRRAGIPIQTVSISDSLTVTGSHDIKVQADCLLADFDFNTVEMLILPGGMPGTTNLSKCEPLCDALMQFSRQGRYLAAICAAPSILGSLGILNGRVATCYPGFEKKLFGAYITTDPVAKDGHVITSRGMGTAIEFASTLIGIIQDPESADKIKASILYSSDAPQILMNKKVKLKGRLNMYMRWPVLLSALLLVATVLMYLVDYRAGLLMTACFVLYVAAAIVIYFYLKPSIVDELVNFAIEFAQVQHNLIHDLEIPYAILDETGKLLWANSCMKEIMGEFIDMKNISTLIPDIKQEMLPDDEEEKKYAHIRYKERYYKAEIMKVCIDDFAMENKVVEMQPEAYQLFAFYLFDETEIQMSRKEIQNQKLICGIILVDNYEEALNSTEEVRRSLLSALVERKITKYMQNYDAIVNKMEKDKYMFVIRQKYLPVLQSSKFALLDEVREINIGNEMSVTLCIGLGVNAASYAQALDWARHAIDLALGRGGDQAVVKEKDKISYYGGKTKQVEKSTRVRARVKAHALRQVIEGKEQVAIMGHKIGDLDSFGAAIGVYRAARSLNKKAFIVINDITTSVRPVIDHFMDNPEYDSDMFVTSETARGIVNMNTAMVVVDVNTSERTEGPELLNLTKTIVVIDHHRQSGNSIENPVLSYIEPYASSACEMVAEILQYITDSVKLRPEEADAMYAGLMIDTNNFISKTGVRTFEAAAFLKKSGADITRVRLKLRDDMQTYKARAEAVKNASVEGAYAYAECPSEGLESPTVVGAQVANELLNITGVEASFVFTVVKGVIYVSARSYDSMNVQLVMERLGGGGHSTMAGTQLKDMTVEEAEAKVKSVIKSMKMEGEIMKVILIEDVKTLGKKGDTVNVNDGYARNFILPKKLGIEATAKNINDLKLQKANEEKVAKEILEAAKAFAEDIKEKSVTVTIKTGEGGKTFGSVSSKEIAAAYKSQLNIEIDKKKLQLAEPVRSLGVYKVPYKVHPKVTAELTVKVAEAMDEAIIKKIMPHSIDSEKAVIGSMIMDADAIVAASEMLTGDDFYQRQFGILFETMVELYNEGKPVDVLTLQERLKMKDVPEEFASIEYISELVDSVPISTNIRQYAQTVADDAMLRRLIRVNEEIANACYQHKESVEEIMNTTEKRIFDVIQKKSTDEYVPIQDVVLSVIDKIEAAARHKGTVTGLATGFYDLDYKTSGLQPSDLILIAARPSMGKTAFVLNLAQYMCVRNHVPTAIFSLEMSKDQLVNRILSMESKVDSQSMRTGTLQPADWEKLIESAGVISTAPLIIDDTPGISITELRSKCRKYKLENDLGLVIIDYLQLMTGGSKKQESRQQEISEISRSLKALAREINAPVIALSQLSRACETRPDHRPMLSDLRESGAIEQDADVVMFLYRDDYYNKDTDKKNISEVIIAKQRNGPIGTVELVWLPNYTKFANKEKMAETRYIISDAARMINVEPHVLRYWEEELAIEIPRNELGHRYYTEKEIHLFENIRDLKEKGFQLKAIRLIITTLNEDAPFGKKENAEDNMTEDELAAVSPAASREQDDREHHKPENQISDNETTGGNEEQEIKEKEDKPVPVEAKPYKVLSAEDKMKHFKTIMDGIVTEALQRNNVQLENTMISQVTDVVIQELGKVEERQEGQSERYYKLLDEAIRGKQRAGREVAAAKVPSYGVPKRRKRLFKRKFRYMAAAVVTKDTLIGDLLRIDANVAPILLGIGMHCLGCPSSQGETIEEAAFVHGINPQELVDKINEFLATNNMAYVISDACVSCGTCAGECPVGAISEGDGKYVIDANACLDCGSCAGACPTEAISQEMKLERISENQIRCTLTRSDLAERELKISELAYGTEKAKALFREMMVQASDELGFEADNIPLIIEAVPVSNECIMLIVTKVEDPEELDTRFSKFTPSPEDTEDLSDTDDEIYSSADDILDIFKRLGSDILSKTAELHSISGTADLPSDTETTSGDASSEDEEPQKTILRIYEFRTLNEVSCLSEQFPADFKCGNTLYKNPNNGHYYLVLSSEGVSRTVFGSICRLASEFGSIQKASANTLYYFDEHYETIIRENALQILRSLMNSIITWEYAGAEYNISQAAQHKNGEPRTFLRISTMKSGGRRENEPIFSEKMEENTGFSVFYRQKCMEVITDEIAERGLRRKALALWILSGALVAVTIGSILFYRNPWLVHRMDASQATTEVLGQIADSRSPYIKIEGMELTFTGYYKVNGSGTVCSYCYMGSVGDYYILTDIPARDKGALVEDSSLDANTLSDYTLTGQVVRKNEITEQLAEAENMTLEDYRNYYHMADVEIHDYDGDQERLRIYQLMLLVLAVGAVAAGAILWSESRLGTQIVSENLMKRVLPIIIVILLIIGVGGGVVWSILAGRYKPTEEVIDYAAEMGLSENEYAITLNQEVLKEDRAVAIDGRVYLSMDLVTETINSRFYWDDNEKLLLFTTPTEVMMITPDQQEYTVKTWNGSSDADEGYMIVRTYNDSCYVAADYVKAHTQMDYAEYTEPNRVVMATKWAEQQIVTLKKDTAVRYKGGVKSEVLRQATKGEKMVLLEAYDDWSNVATEDGYVGWVSNKTLYDAETETPEAPAFDEPEYTSIHKDYKINMGWHQVMSAAANSNLSSVLTSAPGINTLAPTWFSFSDTNGGVTSIATQDYVDTCHANNIEVWALFSNEFPGDDGTIYFDSSKTDEVLGYTSKREQVIRNVIGYVNQYGIDGINIDFELISQEGADDYIEFIRELSIACRANNIILSIDNYVPEYTYYYNRREQGIVADYVVIMGYDETLPSSETPGPVASLNFVRKGITDTLNVVDKSKIINGIPFYSRVWCTTPDGTVSAFACGMSEALSYLTDHGVTPQFLEDIGLNYGSYTSDKDGNFYEIWLQDATAVEEEMKLIREFDLAGVAEWKIGFESGTDIWNTISSYLQMWKKGISGLLWGLAIVMVYSALFGRTISGYETGVNKTVSVMAGEEAHFIVIDSGHGFFDAGKIGVSGALEKDINLAIALKLKADLEAQGFYVRMTRENDVQLYDGMRPSDKKEDMQKRVSLMTDENCILAVSIHQNSFTEEKYRGAQVFYYGPSERSRGLAASIQQALIEFQDPDNTRQEKANEDYYLLRKETVPTVICECGFMSNAAEEALLKSEMYQEKTAWAISVGIVRYLNGSTEKGDIEHDRMTGKKAKKLAAFRLPVRGRYIFKKGIKKLSFAMFVSYHRMMKNVRRIAKWLMACMMTVFLAGVVSAAETTEKGEISSFNNYGENGVYEAIGEYEVAYGSVVADVTRKLPSTLTAKLTTGEEVEVPVTWVCVSDNLGGNTYVPKHSDVSAVYTFEAQLGDGYKIAGNLPEDYVMPFVTVSYTQDAQELNSQAPEMDTEINAAVDTASGMSVWSWIIWIIVIVIIVVVLWWLFAGSKNNKEKMTILYKVHNNLYVNLTNKCPCSCTFCLRQTMDHVGESDSLWLTREPEYDEIIADFANFDVASFDELVFCGFGEPTERIDVLLKVARYFKETYHKPIRINTNGLGNLVNGRDIAPDFKGLIDTISISLNTPNADRYHELVRSRFGDQSFQAMLDFAKECTHYVPNVVMTTVDTTLTKEEEAQCKAICDSLGVTYRIRPWESMSDYHNHQKKIALINDMTGFGRCSIAVALPVISMLRVQCCALPTAIFSNHTGFESFYYQDYTDHMQPSINEWKKLGLEFSGICTGFLGSARQIAIVSDFIRDFKRPDNLVIIDPVMGDYGKPYPTYTKEMCDHMKDLVCYADILTPNMTEACILTDTPYEDKKWHLSEIEAMAARLSENGPSKIVITGITQGQYVANFCYEAGKPSRVLRTHRIGTSRSGTGDIFTAIIAADAVNSVPFDHSVKKASNFIKKCIQRSIELDIPLTDGVCFEEVLHTLKYNMNKLNSRTISINALAIALVCLSTMFLQFPIPLGYAHLGNCFILISGVFFGPVTGLLAGGIGSALSDLLTGYAQWIIPTLIIKGIMGFVIGYIANRTGLTVNMFKIRTAAASIVGIIIMVVGYFIGGSILYGSIYTGATQIPGLVMEGIVGIVLFYVIGSALQAAHLPKYIQRLTQRMTWATDRGTEIWDSFYKLLDETERSGADLLLIAGDLFHRQPLKRELKELNYRFSQLTHAKVVIVAGNHDYIGSQSFYKDFEWADNVVFFRKNHISYVYIQSLNLIVYGMSYDRQEITEAMYDSLKPMRRFRDGRPLPDGCRHILLAHGGDSSHIPINQEKLRQAGFDYIALGHIHKPWIDDRSPMAYAGALEPIDRNDEGPHGYIRGVLNESETKIDFVPFASRSYITLNVPVAPEMTMRQLAEQVKALMGQNGRQNMFQIAISGFRDVDFELDERMLMRLGRVLAVHDHSVPDYDFQRIYDENKDNIIGMYIRHISEMEISDDLKAKALCYGMKAFYQTKMIIKQLNLDHFGKFHGREIDLNPGVNIIYGANESGKSTVHAFIQSMLFGAERLRGRGAGRDAYSKYQPWEGGASYEGRMRLSYQDKNWRIVRNFYKDDSHFEVVDETSGRQEACASDDISSLIPGMQLSNYRNSISTGQLSVQPDGQFTTNMQSYMANMAMGATDSVDVGRALAYLKDERKKAAGRFSQETYHQYRDKAEMLRNELKAREGIAEQQKALEQNRESILKQIQQLENDADGAMKADRQERMKAIQLIQENNDVAAMYKAKKAELREFEGQTGGQKYQQQMSGVVEEYEARQEKLEDYQSRYSELEEQNEGSSIRNLALIFPVAALAVIVWIAGGLVGLKGITHILAAVLLTALAVGLAVFLIRSSGGRKGRMKQLKADMDRLENEQQAILDKYQIEDIHELMEKSQNQRSRQDVVLRLRRELEQLRKRYDELQKPLAPYLEKYGDSVTLESAAGQEQKQKLQKLRGQASELLRQSEQLNWQLEQLNMKQSELSELEEQLKVLDADRKMSEEDMQAIDISMNAITEMTARIHGSFGLQLADYISQLFSYISNGAHKKLNIDEKFQVTVDDDRKLLQPQQLSAGTADQIYFSVRMAVSQMLYDEPMPLILDDSFVLYDDERLKNTLRWLTEQKAFSQILIFTCHHREAEMLESLNCDYHYVELMAQNIEEFRNSIPVGDLGIIPLQSCSELGNMVNEYIVDWRKERESVLHQDDRVKDSYIVNTKCSRFGSGEAKGTILDSIRGKDLYLLVDVTNYSIEYSLCGHMNKMSPDDHYSDLKRIITAAAGKARRINVIMPFLYESRQHKRTSRESLDCAVALQELHALGVENIITFDAHDPRVQNAIPNSGFDSIQPTYQFIKSLFNNVPDLQVDSDHMMIISPDEGAMGRAVYYSNVLGLDMGMFYKRRDYSRVVNGRNPIVAHEFLGSSVEGKDVFIVDDMISSGESMLDVAKELKKRKAKRVFVAATFGLFTNGLKQFDEYYEQGLISKVLTTNVIYQTPDLLSRPYYINVDLSKYIALMIDKLNYDHSISELLDPNAKIQNSLAYYRKYHKMNLKNSQYQAIMRQYDLRQLQHRHLQSQRYQEICDRLPAYRQLEEETASFCADRARAAALGRKDVLQDMQQHLQELQEQKTLLLTQAGYPADYLELTYSCPDCHDTGFIGDKKCHCFKQAMVDLLYRQSNIHDVLKRENFDTFDIRYYSDTKNRSLGVSPRENIQAVLSTCHDFIDHFDEQSRNLLFYGDTGVGKTFLTNCIARELLDASHTVIYLTAFHLVDILQNNTFGNDDMDDTDENMFHYILDCDLLIIDDLGTELNNAFITSQLFLCINERLLARKSTIISTNLSLDELQNEYSERIFSRLVSNYEIMLILGDDIRIKKAISEMPKPITLSAGYSDGVTVIPNTFFDEYLPRANGEFLKIYLYLLRWLSHSDHALSLSGIADIFFMTENDVTRALKYWEAEGLLRLTFDRDGTIAGICLNAVTSISSQKDTPTAPPEQRRPAPAQSAVAAQTGTGITGTPVGTTPAVSMHPRSTQELHRFSESDDGTQLIFIIQQYLGRPLSASDLSTIYYFYDDLGFSRDLIEYLFEYCVSNGHTHMRYIEKVALSWADLHITTADEARTQSETHQKACFAVLKAFGLGGRMPAAGEAEFINKWTRTYGFSLELILEACRRTMMAVHTPSFEYTDKILSNWKSLGAYTMTEVLAADKARSAEKAAAPAKRPAVKQARPSSNKFHNFNQRSYDYAALEKKLAAKIQNGSTNKMYQINFNKPVKIHFMGIGGISMSGLAEILHAKGFTVVGSDAHESAITDHLTSLGIQIAYGQRAENITPDIDVVVYTAAIHPDNPEFAAAKSAGLPMMDRAELLGQIMTNYTNAIAVSGTHGKTTTTSMLSHILLAADTDPTISVGGILKAIHGNIRVGHSDNFITEACEYTNSFLKFNPSLEIILNIEEDHLDFFKDINDIRHSFRKFAEKLDADDILVINGEISNVSEITDGLPCHIITYGLKPECDYAAENITFDEFAKGSFDLIAYGKKIDHIQLNVAGIHNVSNALAAIASARELHIPMDIIKKGLMAFEGTDRRFEYKGQFNGVTVIDDYAHHPTEIKATLTAAQKYPHRQIWCVFQPHTYTRTKAFFHEFADALSLADKIVLADIYAARETDPGDIHSRDIQKLLLEKGKEAYYFPSFEEIEKFLREKCINGDLLITMGAGDVVLVGEALIKMIKKEMIAMLLAGGQGSRLGVLTSNVAKPAVAFGGKYRIIDFPLSNCINSGVDTVGVLTQYRHLRLNSHIGIGIPWDLDRNHGGVTLLPPYEKSESSDWYTGTANAIYQNMEYIEKYNPEYVLILGGDHIYKMDYEVMLDYHKAKGADVTIACMPVPWAEASRFGVVIADDNGNIKDFEEKPPKPSSNLASMGIYIFNWPILREALIALKDQPGCDFGMHVIPYVHNSTHNCYAYEFNGYWKDVGTLGSYWQANMELIDIIPEFNLYEEFWKIYTNNDMIKPQYFGEKAVVDRCIIGEGAEIYGEVKNSVIGAGVIIEEGAVVRDSIVMQGAVIGAGTTVDKGIIAESVQVGRDCRLGVGEFAPNVYNPKVYAFDLVTIAENSVIPDHVQIGKNTAIVGKTVPEDYPDGLLASGQVIIKAGEIMRAIGIVLAGGNSSRMGILANKRAVAAMPIAGSYRSIDFALSNMSNSHVQKVAVCTQFNARSLNQHLNSSKWWDFGRKQGGLFVLTPTMTTENNSWYRGTADAMYQNIDFLRESHEPYVIITSGDCVYKTDFNKMLEYHINQKADITVGYTKLAAGQDDPTRFGVMQMDTDGRVLGFEEKPVVTDNMTVSTGIYIIRRRLLIGLLEKANAEQRYDFVKDILVRYRETKKIYGYEMPGYWNNIATVDSYYRTNMDFLKKDVRDYFFGGYAGIYSKVEDQPPAKFNPGASVRNSLVASGCIINGKVENSVLFRKVYVGNNCVIRNSIILNDVYIGDNTTIENCIVESRGTIRANETYRGEDGKVRIVVEENERYIIMQITDVRVRKVTKEGKMKAVVSITIDNEFVVHDIKVIDGEKGLFIAMPSRKAADGEYRDIAHPINSNTRERIQREILEKYKEAALETEQEMHLIVGLGNPTKQYEGTRHNVGFETIDRIAAENQIRVEEKKHKALYGSGYIEGEKVILAKPQTFMNLSGESVRELSDYYKIPAENIIVIYDDISLDVGQLRIREKGSAGGHNGIKNIILHLGTEVFPRIKVGVGEKPKGWDLADYVLGRYSAEDRKIIDEAQKEAAEAVKMMVMDDVRGAMNRYNTKKKAMKAFTQPLHDLSEYDQIVSDLAGQRTPIHIDGCIDSQKCHLISSIGEPYPFKLIVTYNEIKAKEIYEDYRFFDRNVYYYPAKDIIFYNADIHSNLIVSQRMAVIRRMMDGCPVTVVTTIDGLSDRLLPLEELQKNRCVFKVGDILPLEALSRKLTALGFERVSQVEGPGQFAVRGGILDIYNLADECPYRVELWGDEIDSIRSFDVESQRSIEQVDEVTIDPAAEYIMSVSVRDRGLKLIDRDMKQQVQRLKDAGNYEAADRLKQAVAELKDNLELSSATSGIDSLVQYFYDHTVSFLDYFTEKDSLIILDEPARVAEKGEAVTAEYRESMMGRLEKGYVLPGQTEAIYECRKILARMGSLRTVLLSTLSYNSAHIAVKSKYSMMASSMHTYRGDFQLLVKELTGWKNSGYRLILVCRSETRGKRLVKDLAEYDLLAFYSEDRDRVPAPGEIMIIHGSLHKGIQYPMIKFAIIAESDMFGEDKKKRRKRRQPASEGERIRSFKELSVGDYVVHEGHGVGIYRGIENVEVDGVAKDYIKIEYGGGGSLYILATNLDMIQKYADKDTKQVKVNKMSGPEWTRTKTKVKGAVRELAMDLVKLYAARQESEGYVCGPDTVWQREFEEMFPYEETQDQLDAIEATKRDMESTKIMDRLVCGDVGFGKTEVAIRAAFKMVQEGRQCAVLVPTTILAQQHYNTFCQRMKEYPVNIGLLSRFRTKAEQKKTLEDLKAGRVDIVIGTHRLLSKDVEFKNLGLLVVDEEQRFGVTHKEKIKKIKENVDVLTLTATPIPRTMHMSLIGIRDMSLLEEAPVDRQPIQTYVMEYNDELIREAIMRELARGGQVYYVYNRVNGIDEIAAGLSELVPDASVAYAHGQMSERELEKIMYQFINGEIDVLVSTTIIETGLDISNVNTMIIHDADKLGLSQLYQLRGRVGRSNRTSYAFLMYKRDKMLKEVAEKRLSAIREFTELGSGYRIAMRDLEIRGAGNLLGERQSGHMEAVGYDLYCKMLNQAVMEAKGEKIQEDFETSVDIDIDAFIPSAYIKNEFQKLDMYKRIASIQNADEYGEMLDELIDRFGELPKPAANLLLVALIRAEAHAAGVVQLVHKGKETRIYMHERADVDVAAIPDFLAEYGRRIQFKATAKNPYFLVNMNGFKGQGLLLEEKSLVENMLRILCHKELNMARKKKNDFWDDVEDLNTVSDNDQTGDDDTAEVAVDEEWSAVKSLPLKVIMRFLLMVSCLVALVSAYIAYEYVNDRYAGGSYSTDFFDSASFADEYNKSMDQLLQLVQAMEADPSVTQAGNEELLTTLVENYMGKDTNFSFMILDSDKYRIAASGDDAKDRIEGSNHYVAISNADGQTSIQSPIAGKLLNKDAWTKVLSETSNKYIIYSAVDNTLAQPDSFYKAELSFEKMGEYFGAARFVGIIAAVIFVICLIFCIMSTGMKRGYDGVCLTWWDRVFTEIALVVMIAVAIALGVGVRKLMKMDGDLYHYGAAALAIVTYGWVIRSYFSIVRRIKAGRLLRCSIIGTIVGGISRGIGKLPSPLNVIVGVVILVVINGGLIYGVIFMRQYTVKGIPVMFIAAPVIFIIELLALLVHSGGSDDEDDEVEEETEQEPVDEEDDVRIAAAPGRKNTQVQETEREQNTSANDEPMDWEAMDLGKAIAEAERSQTQKRQNTSADILSEQTVLNVQDDMTEGMTGYVASNVVDVTDGKTEVLSVEDVEKAIRESGLTPEIQPRPQAQPVQTAQTVRPAEETVVNMAPVKPVKEQPTAKQPIMEAADDGRVNFVQLNKDVRKEFRAALKARGVGVTVRAPEKPVIIDIDRNSLKMIITDIFTQIERFSADNERAYVEVYRQDGKVVYIVKITVAPDKTEEAVKAATGDNSFDNARKIVEANAGRFVVAFDNGMMKAGMMIDAAEMANTKHEDAILKMGFDYFRDTILKILGIHHDFVESGITELVELTIHSLYMDFTFLTKDDFYIHIEFQTTDSGKKDLRRFHAYESVLSHKTGKNVITYVIYSGGIEHAVTEMKCGTYTYRVIPIFLTAKDADSVLKRLREKKQRGEIFTEEDFAQLAITPLMSSEIKRKDVILESIKLSKTEKSITAEKTMAMLYTLADKFLTGNDLEEVKEAVAMTRIGQMIFDDGVVRGREEERRLMSALISKLLQAKRLDDLQRAAEDEEYRERLMKEFNISMFRLWGKTFLHNRMTNDLVVCNNSEESRTTKIFQAVTEICQTFDLSEPIWLDINIRDFKRHSKTRFTQDNFIDSIDFDYLEIQVIEEDMERYIYINYAYEDYEYVQKIIEDIEKTGVKVYHGNGSEERVAGSLCVLHFWTPAAHTSKSYRKIMNYTLKHELDTMLFHLDGAQMASEVDVQLDVLHALFKYKYQMLSLKAADAETKAAVIKNESKNTETITTAAKGENTAVVEIKTVESKPEVVEAKSVDELKKAMASSEPKVIKFNADSVTESKAAEKEPEIVNEKIAEEQPDQSQQSEPAKAVEELTTRDALFAEGMRILENGTTREDGVKAFKCLRQAASQGHTEAQYQLSVCYDRGIGVRRNITEAAKWCQMAAFGGHAKAQSEIGYCYEYGQGVVRNIKEAVSWYEMASAQGNIEAKNNLAFCYQKGRGVHKNVKEAIRLYGEAAAGGHASAQYNLGYCYWYGEGVKTDKSRAIELFKQSADNGNAKAAQMLKILSQHLFMKMDHTKMPMNEVLTPDEKLVADFIKTRTKKVLDDIQRLSKEQNADISEWAESFAYLARTYGRDSDETFKWFKYYFREGMIPANVALPLVVQVYLDSSVDGGFVNTFAKAFKQEPEDVRNQRIEDMKQELAEYIDSDGNLTVYRGSFERPFGREDDASRVIEKGFAFSLDREVAKNYATCWFPETAKIYEVKAPLSDVAWYSNYDEEKTVILLPQNKGGHWTVASEEVVPSSEYGSDSEKAVAVQAYASTFKRKMKFLRDITEFIFLEDLPKKADIIIVPGNTWPQPARRAAALYQVGMAPYIVVSGRYSKGRSAFEGPSCDRECYKGPYAAEADFLTDVLMQAGVPGEAILQEREATFTLENAEYIRKMLEEKHLPIKRAIICCQAFHARRCRMYFEYVFQDREIEFLMCPAVTQGISRDNWAESKKGLETVLGELRRCGEQFSWMLQMDNYILMNDMVQDHEARMMHLKRYYPFFRLMDTGLSQYRDGSYGRLDMSYIVLAVLRFFIEANHFQDQPVCYEDYRQFMAGLLVRDFDFTEEEADDELYQYIFDKLCNEGRPFELDYYDPAAHQQKTLRVRLIESELKDQQVLYRISSDAVAFYLDTKEVREESHISVAQLLLEKMIKAQNFRGGLEVIGRINMEVGRLMEERHEIQTLLNRHVTEGLAALENYHDRLMKWFSEEQRLFASNMALSARAVQKMETDRITGEAAEEVYQLDTALKNAMKRHEELMHAYMQMQKAGDEALAKAKRTRFRPSVDFMDVGQRMIEADNPELLTYLVLPLFAPKIKKTFPMSRVDDLLLYKPEESAAGELVEKGREQMYVYEDELAEERMKDNFSYLLRVLLDKIKQKKEVTLAQLNDLYAMKFPDQVLENRDYYAFLVHLSQKEHYDLDMIKDHPDTFLEDTMADFLKANPGYEGLKFRLIYLPDETISILERFEMSNIRFERTEEMDHRNLDKAMEIFACLITGETVGRENHRDLYEAYSSQAEVYDILDAVLKKSNLRLYEYHNTLYVTAGDENRVFGYTNDELKKAIGLRLNRELFLAYLIIYDVMTLFYETTSGEAALTYVKTDMVIESTTALLSGVMARLETIVQNDIEENSFRTLALLWDELPLMAENDDISTLKAARGSKTGFVKLVFNFLITQALFVESAGKYYITDRMRALVENYFDSCKGRLYEVIEQSRRGNMENIERKRQGDVKEPVQDRNSKTEEDEENAAYMPHINRVRVNNVRYNFGTQFYDDFIMRFDCKNVLYDLANGGGKSVLLLLLLQNLIPNCTLDDKQPVEKLFRGEGGSTVIHSLIEWKLDDYLVKDDYRYMLTGFCARKAKDDENQNAAGDAAAIEYFNYVIFYRHYNDNDIVNLPLSDGKERITWPGLKNYLRNLSRKDYQLQVHLFERKGEYQRFISRYGLYESEWEIIRGINKTEGHVRTYFESHYRTTRKVVEDLLIEEIIQKAFMARTSERAENGDSMSLMADTLYQIKDQLAELTRKKAEIGQYDRQQEVMHSLGERIRTLDVMYGEEMTLRMDIARAWQTVLARQKNRTADLAAARREQELAKGHMEDYARKLETVKIQSSKEQLAYLEKETADCSEKLEKLQLEQAVSRDDLNLRESMNDYLEYLEEQQKYQAVENTIRHSTDGQKEQLAQLRAYAKAWQKRCQKRMTVLDDRIVQGRKEMENLQQKLDELASSEREDDRMLAVLEHQSQENREKEQMYLKDFARLREASGLLVIEEVDKELLSQKKKLEAKEAELMQLMEDAKAAEAEKNEQQLQEARNTQMLGHIRTLIREGNEFMAAWQREYEQIAKLLQVYQVTEAGLLKEHLFARYRKLVCDIEERQRQEAALKEKIHQLEDGGLMRIPADVQDFMDYIRTCHGITCVYGAQYLQETNDAERRALLARMPFLPYTVILKDGFAKVAADELLKEKDFGEHAIPVVSLETVLSEEEPVEKSRLLFAGKGSSFYLDENMRHKVCAQSREQLTELQRVIARMEDQQQTYEKDMESVSSFLLVYDSKKEENRQALRENQKKELALLEKQKLIKDRIQQLDGQLSGDAVSIEEARKQAETAKEQYAVLESLRDVNIALTETKHLIEEVRQKYGKLAAKKQEEEQTATLLRTKMQEQSEVCEHTVSEKDLLIKDWEDNWKLYAVETDGQQFLGEQPSKGQVPEDLTDDALRAAFYGIRDAYEKEHMDLDDKKQLMESYARSMERLTKSIADRNLQMARMENLRADGQIYQTAAENIRQIRQDLENMAQQADNMRQQLTAIEADKNRLYGSVAQAVNVIEEKYGAYKEVALNDQSYESYVENMRQLYENTSAEYRSLTGRIERLTKELYALEGIRHDVERLMKLCHVQENLTTETLDEQIGLKRRYEELLRRYEQMQSQYFAKRDAFEKDKAKAVSELHQLGAEGLAAELREHLSLPENAEAAGRVMQEIEETIALIRIEKERVGKNMEDLVSIKDSFESQCLQICQNIRMELDKLPKMSAIVMDNEQIQMVGLTIPYVKEHFYKEKMSAYIDDIVNQSDTLGTQEEKMRYIRQQLAWKRLFSVIVTDMNAIRLTLYKRERIASQSRYLKYEEAVGSTGQSQGIYIQFLIAVIHYISAIHAGAAAGEHLRKVLFIDNPFGAAKDIYIWEPIFALLKTNDVQLIVPARGATPAITGKFDVNYVLGQKLMNHRQQTIVVDYHSNVKIDEMEYVKINYEQEVFDFVMENNKINEGALTKQIKTLVMQERYEEAMKVLDEIEVSKIRNISILCLVGEVYMGLKRYDEAEQILLRVYEKNPNTRRILDLLTTLYIDKGEYSEAEYYYKEFIGVASRDLHRYILRYRLDKGKGERLSVLIDTLEKLKDYEYIEEWAYELATLYEASGETKKCIHECDEIVLWFGHGEYVDKAIALKCKLTGEPLPEISTVEQHRVEEEQRAAHEKQLTESIGAEMGIEGFAGADYEGSIDLDLIQRAMDGAAPEAADEPIVETAVTEDTLRDEVIVEEPVLEENEESAGSAEGEETQDAAMAVDAGNTDSETVNADGNTADDDGHAESADEDSEAEQPDEDSEAEQPDEDSEAEQPDEENEKSHIAHLFSSLMFGRKEKEKHFDWSTLKLAKEKGEKPDEIELAAAAITAAQSQESQAGEKDEDIFLHEEMPVEEMSENTVAEDAPEKEVPESEEAEDAAISTEGLSEEDADFFGKLMGEDLVADYTRSQDSEEEIIVDDDGVSEDTVIIDDDDDDSENEAPEAAAAEDEIIIDGDDEKDEVIPETKEDTLDDLFGIAGEVHEDELIDDDDEDEVISEDDSSSQNDSADEEEDEDDEEDEISDDIHASDTVLDIFGTVTGVESIKSQLAKTFTKFEDPALDNMDLLAPYDINFVVTGYDMSVKSQIAIGIAKALNTYGICDKNKLVRATAQDLNGRDFSMIFEKLKGGCLIIDGADMLDDKAAGIIVDFVQQDNQDVAIVLEGEEDKIKELFRKYPVLHSKFLNIIHIGKYNENELVQLAEGYAKKKGYEISGPGAASLKTLLRERMQDGYSVDYEDIMAIIEEAIASLEKRNMKNLFMTVLDNKYEEAAMFMLQPEDFKNINIPDMRILVCVKQVPDTAEIKIDPVTNTLIRAGVPSIVNPFDACALEVAARIKDADPSTEITLLSMGPDQAKDALRECLAVGGDKAYLCSDRKFGGSDTLATSYILASAIQSIEEKEGKFDLILAGKQAIDGDTGQVGPEIAAHMGLAQVTYAAEVSVEGDDIIVKRESDKGYDMISVQKPAIVTVVKTEFEPRYPTIKSKMAARKKEITVITSEDIPNIDLTRCGLKGSPTKVRKTFTPVKNKNCVMVNEGEVEVSAVKLVDLLVDAKVLMSFEEYKNLWVFVETEENEVKPVGYELLNPGRELADKMGAKLVAVVIGGKVEDIAKKAIEYGADEAILVEGDEYFNYTTDAYSIAMKTLVDKHKPSAILIGATNNGRDLGPKMACDLNTGLTADCTGLDYDVEAGNMVWTRPAFGGNLMAMILCPDNRPQLGTVRPGVFKKPELVEGREGTITREDIHVAADQIRTKLIERIEEVAEAVNLEEAEIIVSGGRGVGSEEGFGVIRELADVLGATVGASRAAVDEGWIPRAHQVGQTGKTVGPKLYIACGISGAIQHAAGISGSDCIVAINKDPDAPIFDVADYGIVGDLFTIIPIMIDQIKKVNAMKRIIRTIMMSAIIAILTACSGRNVSMETEVSSEVSSENVVTSSELTSENASDDAEAVRDVFAMDTYMTVKAYGSNGDAAVDAAVDEINRLDALLSTGKKDSEIGQINANNGGQLSEDGAVLMERSLELYKSTNGAFDVAIYPVMKAWGFTDGNYQVPDADTLKATLELADPSLIDYDKETSTVSFKKDGVQIDLGGIAKGYTSSRIMDIYKEKGVTSGLVNLGGNAQVFGTKPDGSLWRVAVQSPDSEDEYLGVLETKDKAIITSGGYERYFEKDGVTYHHIIDPSTGYPADNGLISVTIVSADGTLADGLSTSLFVMGKEKATDYWKAHSDEFDMILLTDDEKLYVSEGIKDSFTSDREFEIVEKMKFWKRFGGYMPILATIVVVGCVGTALKGYAAPVYEVEQPENIQSTEADAKEKKQETEETEQAKKGNFDLADGFYKGSGTGFAGTVSVSVEIKDKSIVAINILSTQDDEAFFNRAKGVIDKIIAGQTLDVDVVSGATYSSNGIISAVKNALTGEQDTSTPATTASSSNQSSPSIETVDDSNQTWKDGTYYGSGTGFNGEVQVEVVIADGKISNISVVSHNDDSSFMSQAQGLIPNIISSQSTNVDAVSGATYSSRGIIDAVRAALKQAVVNGSSNDADDSNDDNNNNDNNNSNNNSTIVEGKVPYEEGIYYGTGEGYAGDIQLAVVIQDKTIKAILVTECEDDAAFFNRAKSIINEVLKNQSTDLSGIDTVSGATYSSNGIVEALREAFKAAENGNSGKPAESETETETETETETESETETDNKDSVYIDGAYTVSVVCEPDEDQDFEAYNLSMTVHIKDDKITAVTDIVGDGDQSNESYIKRAAEGTSKLPGVVTQITEKGGLDAVDTVTRATCSSNTIIEGCQKALKAAKRTPEETDETEPGESETEKPANRTYADGTYTVSVICEPDADGDFEAYDLTMTVQIENDRITDISGISGNGDSDNDSYIKKAAQGTSKYVGVVTQITEKGMPEGIDAVARATCSSNAIIEGCQKALDEAKKLAEEGKMKTFSVRAVNLVLIVALLIGYNTVLTLRDKDDQIAKLTADLESANLYKQSVMQSQEDAAGGSYEDGIWKGEAQGFGGAIRVEVTVEGGSITDISIVSAEKEDGAYLSMAEDIIPTIIDAQSADVDTISGATFSSTGIKNAVAQALEEAAKMSKIDIHHLTKKQRKQMHGWLRAIIQLLYFLFLPSAYTAAFAGVKYIFTQLGAGEKIGLTSFVSVLIVLCLYTIVFGRFFCGFACAFGSFGDAVHFVYVWICKKIKKKPVKLPETVTSKLSKVKYVVLAVIVLLCFKGVYSQTQGYSPWDVFSMLHAFNFKLGGYLLGIVLLVLIMVGMALQERFFCRFLCPMGAVFSLLPMLPFFTLKREREQCIKGCSACTKQCPSDIGLPEAGSLDVSGDCFQCQKCIDTCPRMNIHCGLPGIKGNEVVLTLIRALILFGLFIWLGIMKKNELINKTLAGLMIAAMTAGVCPTTAFAVTEGQVAKDGTYKATAHVSRTAEDDENDNEWDEYDVEVSLTVEDGKFKDITVTPGAGYDSVNSSYFNKAYNSNTSKNKGIKTILEGQAATAENIASWDTVTGATRTKDAIKKAATDALAEAEEAPAAVEVNTEALQAAITNAEALEEADYTANSWAAMQSALTAAKDAATKKESQDAVDTAEKNLTTAVANLKKAEVKVDTTALEAAITNAEALKEADYTADSWKTMQTALTEAKSALGAKESQEKVDAAAQKLTEAVGKLQKAEVATTKYLVMNVPYNKFYEAYHLTDKAVWEVESGVDAVSTATTNKFKGSTGLAKGTYNNGKYIMGVTLPVEVSAEDYKKLNASLTENDDYYFTTLDTAPEAYSKLTINEDGSYSFSKVSDATVTNKYLSVGELDLNGGYGDYQVTIDGLGTKDGMKIGESETKPYTLYGAILNTTAGKSYGMTTLENTWLGTKHPNVEIAWSIKEGQGLRRAHGSGDLFYQFADMNGATLSSVTLITSLGTIEVPCNVELTKYYEGDLSGLKYALENDSKELSISGIPADLKDVKVSVSGGLATDAEVKDGKVALTAAPTAGTQYTITISSSNYPDITRKTSTPITEEQKAELQKWIDKAEKTSGYDNNADLKEHVKEAQDMIANKEALSADAKELIAELVSKVKATYAKAEASATLEGSKLTVTLDGVELSELENPTYTVTYRQGRGMATLTSGNLGALTVTLDKAPTVGTDYTVTIVSDNYQDIKTTVKAEEDPSDYEYVLMNIPYSAFYKEEVNNDVDVDVFTSATLNKTRTASLAGGSYHVNADGSQIDGITFPVKVDKNVDLSKYKQVTDTDSVDITVTIKGQTSTTTYTGKEALFQNEDYAYYNLTEVPSCYKEVSVDGDGNLKFGKTVGDVTTLESLSAELSTETRYGDYQLDIDGLRNKLTDHGATKINGVVINTKEGSSYGLRHLENIWKMKELAWSTGFTESVHGCPTSSAHYKAMMGQTITSVTCYTDKGMYNIPLADIYVPVKFTHDLEVANAAVTAGKTEATVTGLPKDYVAEYKVDGLDGVSVQKGVLTFSNAKKGKYTLTISDKNGKYADITTEFELYTEAMPAAYDADKKALVKTADAADEEFADYIKNITSVNVNGTDYKASGHGATVIINEDGSIKTDAAPFAEGDTFEITVSATGYLPQSFTYTTKVAPAPAEVNTATLEATIAKAEGLKAADYTADSWKAMQTSLTSAKAALEAKESQEAVDAASASLQSSIDALKAATPAESEDDKKDETEAVDTAALEKVIATAKGLNKNDYTATTWTTMQAALTNAEKALEAKESQTSVDEAAKTLQAAIDGLKKASATTTTTDDKKNNNNSSNKNNNNSNTNNNKNNTTNSSTNKNSTTSPKTGDPVSVMGLLGAAISSVGLGGLGLKLRKRSRKQKMELIKNVEKATPFSVADQVQYESGKVVSLTLAQQPASGMTLFAFDADEAISTHAAGGDAMAFVLEGEAEITIDGTPNRVTGGHAIILPCGVPHAVKAITQFKMLLTLIREAMDTLRNLPTDAPANLASLIDIREGRVVSMSLSKSDTCQIMLMAFGSGESVSEEIYFGDTLYTVLEGEMPLFIGNAKYLLKTGDSLMIPSGTSHAIGGAGGFKLLQITLQKMYDKSVVITTKKVTFIRECFYHKRISDMIGTKEMRGKQMTEVKILYEDKDIIVVVKPAGMASQEERSVDVDMVSWLKTYLVRQKKVKGMPYIGVIHRLDKPVGGVMVYAKTQQAAAKLSEQVRNNKMTKEYLAVLTGTLPKKEGRLEDMLLSNGKTNRTEVVEGKIAGAKKAVLEYKVKRTKFEEGQQYSLVNVHLITGRRHQIRVQMAHAGAGLWGDTRYNPVFADQKGWFNLALFAWHLEFEHPVTKKRLIFKEPAGPQITAHFKTEECKMLAVNYTCLRDNMKRYMDQVTDDYETIIVTRKNNKNVVMMSEEMYNNLMENVHIVSSKANFEWLMQSKQQLEAGNFSQHELAEVDDEMNKVFTSNGWEDYIYWQTEDKKTLKKINTLLKDIDRNGNEGIGKPEPLIGNLSGFWSRRINEKDRLIYKIDEYNIYILSCRYHYNDTMNRTVMIRLATPEDAAEMLKIYAHYVVNTAISFEYEVPSEEEFRERIESTLKRYPYIVAEQEGHIIGYAYVSIFHERKAYDWAVETSIYVDKDYKRSGCGKLLYQALEKILKKQHISNLYACIAYTEHEDEHLTNDSMHFHEHLGYELVGTFKKCGYKFNRWYDMIWMEKMIGEHPENPEAFIPFSEMDVREIFELILMACVLKAKSTTFVSKRLSEKFGKLWLAAEVILFVLVGAAVDIRYTLEAGLSAVLMILLLQRHLGLWEWIMETPHTADILSEPLTQTTDPLHCHSHINMFSQKSFYDRRWPLSRFFALMVPPNEFWSLFSRWLAVEGIDKGKCFLLQQSVLPLLLSKRQMAKEKKQVREITSMSEDFAQWYTDVVVKAGLIGYTSVKGCMAIKPAGYAIWENIQHELDKRFKATGVENVYMPMFIPESLLQKEKDHVEGFAPEVAWVTHGGLNELQERMCVRPTSETLFCDFYAKEIQSYRDLPKLYNQWCSVVRWEKETRPFLRSREFLWQEGHTAHATAEESKERTEQMLNLYADFCEQVLAMPVIRGQKTEKEKFAGAEATYTIEALMHDGKALQSGTSHNFGDGFARAFGIQYTDKENKLQYVHQTSWGMTTRLIGAIIMVHGDDNGLVLPPMIAPTQVIVIPIAQHKEGVLEKAEELRDRLSGFRVKLDATDNKPGWKFAEAEMRGIPVRVEIGPKDIEANQAVLARRDTGEKIVVSLDELETKVDELLKEIQSNMFEKARAHRDAHTYVATNYDEFKDIIANKPGFVKAMWCGDRACEDKIKEETTATSRCMPFAQEHLSDVCVCCGRPAKKMVYWGKAYMDINRLRMFIAVADCLNFTKAAEKLYISQPTLSRYISELEETMEVELFERTTRRVVLTKAGKLFYDESLQIIKKYDALINRVARLGTGLSGTLKVGYLELFTQNILPVAIRSFHEKFPMVDMQLRETRLQEANQKVLDGELDVGFVITHDMLERKPELEYRHIYAGQVELIVSNQHPLAAYQMVNPLMLKDEKILMFDAGETPELQEQITNMCMKAGFMPNFITGNFSPGAIFLMVQAGMGVSLLSSLITSVLLTDDRFHTLTLEGIQAVANLEMIWRKDNDNPCIQNFVSEVEEAAHPTVPNISKLYMKKIDFEAHYYTQDFFDAIADREGIPSFRTSDQSMYHGGDGRIGIRPIIPKLLELGEKRIKDMDAAGVDTAILSASLGVEQLPAEMGIKEAEKINDALGSAIAQYSDRFKGYAVLNVKNIQSAVRELERCRKKYGFVGWNAFSNYGSQNLDDPDMYVLFETVVNLGMFVYIHPTVPVADCFKGWGPALATSGLGFAEDTAVALTRLILSGIFDRLPELKIVIGHSGEAFPFLIQRLDDAYLRSKWTNLAKNKKMPSEYFGTNIWMTTSGNFSVPAFQCAYDTFGSERIMFGTDYPMEDMIRSVEFVDKLPISIVDAEKVYYKNAEKYFGLMESIKGFSLVNWIFVILGLICAFICPAFIQPWSTLTPAGVTIFFVFVGTLLMVIGSNSLIWPIFAAMAGLVAYGCTDGNAIAAALFSNGTVVMMLGVFPLSWALNESGFGYVVAHFLLTRKVLKGRPVLFTMVLFFALLVMAIFTSVFGALMFGLPLVKTLCKQAGYDTDSQYYKLCQVGTYMFATMGCMFFPFTNGMVFASLNSISTAFGAEVSTVAYTISGLVVDVVFIIIYVLMMKFVFRADMSKMANIDAGKLSSEGDNKVTKKQLVLVISFIIAALYSFVVALLPAGAAITIFLSRFGGSLWFCMIVAILCIVHMDGKPIMDIRRALKEGVDWNTLFAIGGFMMLGNYVSSEDSGIMGWLSQVFKPILGGIDNIFVLMLIVCLITIIVSNFFSNMMTVIIFGSVVGPFVANFTNINPVVIMTALVFCAWNAYLTVAANGTAPILLGYEGIDTKFIWTKGIIITIVYAVVAALLFTCMAMILMKMVAISQELSSTSYPGRGIIIGRSADGSKAVTAYFIMGRSVNSRNRVFVEDGEGIRTEAFDPSKLEDPSLIIYAPVRVLGNKTIVTNGDQTDTIYEGMDRQLTFEQSLRSREFEPDAPNYTPRISGILHVENAKFNYAMSILKSNNGNPDSCNRYTFAYNNVPAGEGHFIHTYMGDGNPLPSFEGEPTWVKVDTNDIDAWTKEIWENLNEDNKVSLFVRFIDIATGKYESRIINKNHMKELELKYGCNPNQKPSRIFMNEGELPITVLNGRPGYINFLDAFNGWQLVSELKRATGLPAATSFKHVSPAGAAVGLPLTDVERKIYWVDDMGELTPLANAYARARGADRMSSFGDFISLSDVCDVATAKLIKREVSDGVIAPGYEPEALEMLKAKKKGNYNVIQIDPSYRPAPVEHKEVFGITFEQGRNELVIDKEMLNNIVTESKELPESAKIDLVIALITLKYTQSNSVCYAKGGQAIGIGAGQQSRIHCTRLAGQKADNWFLRQSPKVLNLPFKEKIGRADRDNAIDLYIGDEYMDLLADGEWERTFTEKPEVFTREEKRAWLDQLQDVALGSDAFFPFGDNIERAHKSGVKYVAQPGGSVRDDQVIETCNKYGMTMCFTGIRLFHHMEANMCKLENFRKNAASQSISCEIVGGHVVQSEMTGEDGHKLCFLLGTMLEDYLFNRKKTDQVLFGPVDFHLDESNIFQPDLAVVEQSESYSGGMIRTSELNKIPKLIVEVLADGNAIYDCLDKAVLYGKNGVREYWLIDLNEEFVYTYSYRNGFEYRRYSFEQSMRSVCYPGFECCISDVLWDGGGSLKELAMFYRFKKEIYPENSVQVVAENSSVYGGYQERQYSAEAFYEWMNTRKNKLQYTSLVELLLGNIRESAMPAFRHQNVRGNLYFAIKSYLKREKLPYQLCFAPILVELKKLDLLDSVVSPDLFLISSGEVIYDNIYRGVPQWIIEIVTPATAAQDYIDKAQLYQYHGVGEYWIVNDWKQQVMVVRYLPSVPEGEDNIETSVYDFQEKIPVGTLPGLELTMSEVLKEFDMKQLVYFIKPEEVCQQLFSFISKFLSDPMESVLFRVVLADSLIMIPLLFMQKEKTAKTDCMKNALAYTVSNRQMTCFHHYHYGIMDDNMFTSVNEQVGTIAGQVGQTPQGWNAGIFNLIQNISQTVIVPIAGLIITFVLCYELITMVTQKNNFHEFETYNIFLWIFKAYVAIYLVTNTFNITMAVFDVGQHVVNNAAGVISGNTAVDASEAITRIVDALEDMELGDLFLLSMETLLISITMRILSIIITVILYGRMIEIYLYTSIAPIPFATMTNKEWGNIGNNYLKGLFALAFQGFFMMVCVGINSSASGANVVLGAKSSSNYMKYVFTYQSNGYYKIKNVASGKYLGVTGQKSASGSNVEQASGGTRWQVIPDGKGSYYLVPECSNTAAVDLTNGTVANGTNIRIWNYNLTEGQRWKLESTTTSTVAPKISGQTKPSTMKAGSSFSIRGTITSGQKLTEVTVGVYDTSGSMKIGKTVRPNTTSYDLRNVDTSIKFGNLGTGGYRYKVTAKTSAGTTTLVNSTFMVLGNGRTVANGTYYIESMKNNGYGLNTSGNSSASGANVVLGAKSSSNYMKYVFTYGRTVADGTYYIESMKNNGYGLNVSGNSSASGANVVLGAKSSSNYMKYVFTYQSNGYYKIKNAASGRYLGVSGQKSANVDTSVKFGSLGTGGYRYKVTAKTSAGTTTLVNSAFMVLGSGRTVADGTYYIESMKNNGYGLNVSSVMDNSYGKFRELLEYKLTWRGKKLVRVDRFFPSSKKCCKCGSVKKELKLSDRVYLCRCGNRIDRDLNAAINIREEARRMLLAGMRRDSSETKRKILTVCVRLFLEQGYKNTTVSQIVDEAGVARGSMDKYIYDEKNGLWYELQGDYYLPCLKLPKEESRHIGVWGQRHLRYLKQHRKVLYSELLISGKLNDYLADLNEQAEEMFSRLVKQLAEKEGLTEALKAENQMLWVQKMNNIHNAAMEVVSNDLIYAMWWILVIIIIAVVVMGFENEGKYKEDKYKEDEQKQWEKQIAPYARVKYAKITYVPHSPYGEKFTLVHQIDVKTDSIYGRWYRYFVDSSAFTDCSKQSIILLDENKKEIPLQKNVHMMCEKLAEGCGNIVLTFDAMLGLMKFKKLFWKKSDEHDKLDELDHEFIAGFTKREIIRMIQNMSDEELGKASADIDKRIAELEKMGKIGFDNEKYLNMQSEHIRERMAQFGGKLYMEFGGKLFDDYHASRVLPGFQPDSKLQMLLKLKDQAEIVIAVSASAIDQHKKRGDIGITYDQEVLRLIDLFRSVGLYVGSVVITQYQGQQSADGFIKRLGDLGVAAYRHYMIEGYPANIPLIVSADGFGKNDYIPTERSLIVVTAPGPGSGKMATCLSQLYHEHQRGIKAGYAKFETFPIWNIPLKHPVNLAYEAATADLNDVNMIDPFHLEAYGKVAINYNRDVEIFPVLQTIFKTISGTSPYQSPTDMGVNMAGNCIFDDEAVKKAAREEMIRRYYIALCEQKKGKENKAEISKLEMLLNQEGLSTADYAVAVAAKTTEEETGEPAAAIELPDGRIVTGKNKALLGAASAMLLNALKALADISDDEHLLASEVIRPVQELKVNYLGNHNPRLHTDEVLVALSVSAASNENAKKALDCLPMLKNCNAHCSVILSSVDTDIFRRLRINLTCEPKYQNKKLFHNNMGKEAKTNAMRILDKNKIPYEMNTYTCDEFIDGCHIADQLGQPYERSFKTLVTVGKSKNYFVFAIPVDKELNLKAAAKAAGEKNVELIHVKDINAITGYIRGGCTPIGMKKQFPTFIHESAADFDTIIISGGRLGVQLILSPQDLINVTRGQFADIIMHMRNFIFISPHFPTNYENFCVQLHENGVNVFGIGDTPYENLTDSLKTALTEYYKVDSMEDYDQMYRAVAFLCYKHGSMDGLESNNEYWLEQDARLRTDFNIPGMKTADMEHVKYKSKMKPYYAKAGIPTARYHLVTDLTESLAFVEKVGYPVIVKPDNGVGATTTYKLKSEDELRAFHEEDFHGVQFIMEEFVPGEIYSYDAIMNSKGEPIFETGNHTPISIMDSVNNHDDSVFYIEKHIADDVRAAGRAAVKSFGVKSRFVHFEFFRLTEDHDYLGKKGKIIGLEVNYRPSGGFTPDMINYACSTDVYKDWADMVAFDRLTKEEYPDKYYCVSAGCRKEKHYLHSYEEVMAAYKDDIMMTTELPEVLASAMGDRLYLARFAEKEAMDAFISYVFATAMIELHVTYTMKPGIRPKAFYDALNAATIPETCRQEKGNIRYHYFLPVDNDNQLFLLEIWEDKDSLKAHQQTPHFKAMPAIKDQFVEKTDCVRYDTLMFQILIADSDRAYRRRLYQLLRREGYSVLQASGGEDVLKVLETSYIDFIILGDNLVDLNVYELMGQLRDTYSDMPLMLLAEKKERDGLRKSYMAGADEYLTKNVDEEELVLRIRAVLRRSGKNYDKKLQVGDVILDCDSLSVTRKGDRQTLPRKEFWLLYKLLSYPDKIFTRTQLMDEIWGLTTETSQSTLNVHVNRLRNKFRKYPEFDLKAVRGIGYKAEVHVDMSRAIGIDLGTTNSCVAVLEGGEPAIITSAEGLRTTPSIVAFTKKGERLVGAPAKRQAVTNAERTISSIKRQMGTNYRADIDGKRYSPQEISAMILRKLKKDAQDYLGETVTDAVITVPAYFNDAQRQATKDAGRIAGLNVTRIINEPTAAAFAYGLNNGEDQKVLVYDLGGGTFDVSVIEIGDGLIEVLSTSGDNHLGGDDFDDRLTDYLLAEFKASDHIDLSHDEAAVQRVREGAEKAKVELSSSTSTTVNLPFLTMVKDMPHHMEVTVTRAKFDELTHDLVDRTAGPVQNALRDAGITARDLSKVLLVGGSTRIPAVQDKVRRMLGMEPSKGINPDECVAMGAAIQAGKLSGSLPENSAASSIILMDVTPLSLSIETVGGIATHLIERNTTIPARHSQIFTTAANFQTSVDIKVYQGERQFVKDNTLLGNFKLSGIKRAMAGVPQIEVTFDIDVNGILTVAAKDMGTGKAQQITITSRSNLSEEEIQQAVREAEMYEQEDGERKGYYELHSESEVLIAKTEQALKKAGKQLDRSEKHQIKSAMNQLKKSVVKMKPMKMQENDAHQLQSEKEILENLTARLFSLAESDENRMLKLIKYELIKQRTSKVIIGAILALLEVAFLAGMLLGKEEIMAIAAGMLTFLASVTFVIVGLEEIITYYHDLRDKSGYMLFMTPYNVYEIMGSKILTGFFSIAAAAIIFGIIGFADITMVCAKYGELQTLFDQMKALFSFTLQVNVDGMLIVWSIIQVVFSWVGMVTSAFLAITLCITIFSGMRCKGLISFVIYCVLNIAVSAVVVQILNWTDMASANGMMAVFSIFDILFAGACYVATGYILNKELSLMLDCVNVVKRYGGKFAVNGMSVAIEDAHIYGLLGPNGSGKSTWMKMAAGLIVPDEGEMTLDGVKISAETKKHIAYMPTEGYFYSYMKIKDVGRYYQDFFDDFDAQQFEKLIADMDLEMNMKVRNLSSGMMAKLKIAVTLSRKAELYLLDEPLNGIDLLARDEVVNTILTNMSDNASVVISSHLVEELERIIDKAIFMKDGQIVLMGDVEEIRQERGESVTDLYRQIYGMRYENDRPIYLQVIEDISRRLIQGELALGEKLPSVREMAVQYQINPNTASRVYKEMESRGLCYTKRGMGTFITEDSGMIKTLQSEMAEDCLDTFLQGMQAIGIGLDEMIQLLRERYAKEELMKHLNNGQTGRSLIEFDSVRDLFTLRVFTLKEKVTIILMEIRQLKYFAAVADTLNFSRAAETLFISQSALSKQIADLERELGMVLLQRDKRSVRLTPAGKVFLNEAKVILMRMDTIPILLKNTKDIEKKEEHNVFIGVESRVGDSPIFHLGVAEAVHQLRQEMPTLRAIFKMGEYLDINRDISEETLNMGVFMGTKEDVNESLKYRVLYEDEMVFVYRGEPVETIGIEGIKQILSEKPLYIIDKEFRGMSQVVRMLGAIGCAPSIRFCESTLDMSFIMESGEGCVVIPSSMVRKYKNPKIHTLATHRPEAKLYFMAMWKKEGEHRLEEMIALRAGLNIETFKMNHFTTFSQYEYVRPDFENAKELIRKSVDKIKNAGTKEAVSKVFKAVNDQQRHLRTMATVAEIRNTIDTTDPFYESEMQCFYENMPLVDLEMQEFQKTVLQSEYLDALKDEYGELYFIRMERLMKLVSKENVENQVEESNLVQLYHKTAAKPVAQFKGEKLNFYGLLKKMQDPERKIRKAALTAWSDLYQSIADDLNDIYTKLINNRIKQAQVLGFKDYTEMMYLSMERFDYDREDVSCYREMIRQFVVPVVAEIYEKQRNRLGIDHLYYYDEDMSSPEGNAIPYGTTEEQVQLAQKMYHELSKETGEFFDFMVQHQLFDLETKPGKMQGGYCTFLPDMMAPFIFSNFNRTSADVDVLTHEAGHAFEAYTATRNGVPDEIAFSTSEVAEIHSMSMEYLTYPWMDYFFKDSADQYRKTHLEEGLRVIPYMACVDEFQHEVYAQKMTDTDKRYQLWHALEEKYMPWRDYDGDPFLEAGGFWMQKQHIFMCPFYYIDYSLASMGALEYYIRSIDDRETAWEDYFRLCSLGGSKGYFELLKEGHLSNPFKAGTVEHIMKVLKEKVLQISHSKEVRPLEDDEVDRAEVEGQYQSNGYYKIKNAASGRYLGVSGQKSASGSNVEQASGGTRWQVIPDGKGSYYLVPECSNTAAVDLTNGTVANGTNIRIWNYNLTEGQRWKLESTTTYESGKLIRKKYLTLSFPYSNDGYSQVFGGETAECVCQGLVDIFEFIGGVPPLLIFDNATGVGRRIGDVIHEAELFSRFRAHYHFRVRFCNPYSGWEKGNVERKVDYNRANLFVPVPHFSDVVQYNHKLLLKHERKASELHYKKQVPICELFEEDRKALLMLPPKPFNVCRYEWLKADGYGKVCMDGKHFYSTRPENANQKVLVGIHAHTVDILTEGGQVITTHKRVFGDNRSDVSDYTTTLAVLMKNSGAWGNSGLRQETPDALRTYMDAQPKEKLKDCLRIMNELTNQYGFQAAASAMEMACAYESGKLIRKKYLTLSFPYSNDGYSQVFGGETAECVCQGLVDIFEFIGGVPPMLIFDNVTGVGRRIGDVIHEAELFSRFRAHYHFRVRFCNPYSGWEKGNVERKVDYNRANLFVPVPHFSDVVQYNHKLLLKHERKASELHYKKQVSICELFEEDRKALLMLPPKPFNVCRYEWLKADGYGKVCMDGKHFYSTRPENANQKVLVGIHAHTVDILTEGGQVITTHKRVFGDNRSDVSDYTTTLAVLMKNSGAWGNGGLRQETPDALRTYMDAQPKEKLKDCLRIMNELTNQYGFQAAASAMEMACANQALLCLASEIRRDRAEPERYGRKLLFIFFLILYNASMNYDTPAVGIFVWVKMMCNLGEGIEERTAARVTKEVTKELNAKHAKELTEKLAEKDRIISAYQLLARHTPIAQIAAETGLTEEAIRALMNTAITNRITASNDKAQYDEYAKQLIAQKQILAYILVQTIDEFKGMQPEDIISRIEGEPLIGVVPVEPGMTNTSYTHSSGDQLIGLNTENSEINEGMIRFDIIFYVRMKDGLAQVIINIEIQKDEPTQYFLLNRAIFYVSRMVSSQKGRDFVHQNYNDMKRVFSIWLCLNMDSHSMCHIHLTRDDLINHHNWKGNLDLLNIIFLGIGEDLPPQEEQYQLHRLIAALLSNQLPAAEKLKIIHNEYHIPLSQPLTEGVNMMCNLGEGIEERMYTMSQINHIKDLSNCGYRISEISKKTGADPKTIRKYLSQEDFSPVPPVVQTQPSKLDPFKPVIQEWLDMNYYNASGQMDLSDRIAIETGICIGESFKKIAKRLRRHPSTIAHEVKENRTFIKGNYPNGKDCRMARQCTVRNLCGCDEEACNTKCRLCRGVDCTKVCDRYVSVACHKFDSPPYVCNNCKDKKLCNKDKYIYSAKFADVAVTRRRSESRQGVRLSDEKKEELDELVTRLVKKGQPLTHIYAEHENEMPVCLRTLYNYIDEGALSIKNIDLRRKTGYKPRKKKYNDINGFHSMEYRQCRTYEDFEYAMKFKYSEDEVTEMDTVKGVRESGKRLLTMIFRKNNVMLLFLMPDGKAESVKRVLDYLETGLGIDVFRRLFPVILTDNGSEFKKVDELELTLDEDGFLVYRTSLYYCDPMASWQKGCIEKNHEFIRYAVPKGKSLNPYTQEDMTLLMNHINSVKRPGLGNKSPYELVEEDDEDFKALMSLLKMHLIPPDEVHLMPDLFVKKMLNLEQIKRELKKYNFAYEENVLPVHANGHYFLYGFYEKGIAIFALRPDWTIDEGALLPWGDVLSLKVKKSLLFENTIDILTKKMNISMKIMKSTGGCSWIKENLKKLENLNYYQNLSFAFGGAEKADDNCAASRAGQKKAQERENTTEIVEKIYRKMTEYTAAPMVSFELEEGDAGLFDCKIGGAYYVPEGEHRLENSRTGEELYLLAQVNFAQIPHLPDYPEQGVMQILISSEDMYGCNFDDGYDQTGWCIRYYETLPERAEKACIHEPDWHEDTALPMERAVTYRLKPTKIVQTMPFDDVNFWPAADTCLDRELRGYLENDDVMDGLCDMYEEYMCQVGGYPFFTQSDPRSVDDGEILLFQLNSVKDIMWGDAGVANFFIDREALKNRDFSHVMYNWDCYMLHYSVDNELMSDLYRDYRQMKGAEYAQLHELGEHYLSLIEGYDLEESTIKTLQGLVQFETEEELESVENGIVHGYLTAKAALRKEQAEYKEFVRMFDGEEQQALNGLSEYVVGQKKIPYKIKNRILHVDVLSTPAMSLELDFADVLIEDGRHPREILITHLSGECFERTETVKGENGAEEKVSVPYYRLSFVNGLSEGPYQAKESSFVFRSLKGSLHLYNYDSAMEPLDVDADKLPWRILMHPLKAMLEKAQILGVESLDKDELRALPLLCVFYELIQFYLAPTTEAGIGKSLIRFDEDAAENFAFSQNDLEAACEYLTPYGLEELTGWLHKAIDERAAFCRYWIQFASMKKAETLYGVLTDILDTCSQYYEKRVLPLSCRKHHGAVRRALNEYFCRHKWRGEYPYYRRVEPSSFLEVSNVYKRMYTYINEKQKAFYVDFIEGVTENSYSITAVAGYVLLKDGENARDYRALNGYFLDGGRRNSHIVGQITINDMMNADQVIELLNTMMQDIMREFAQKRQMRKIILASASPRRSELMKQAGLDFDVCVSTKEEKKGPWEPEEMVRRLSRQKAQDVAERYAEDCIIVGADTVVSCDQEILGKPANDQDAFRMLHMLQGRTHEVYTGVTVIEGSADVRKETVFAEKTEVTMYPMTDKMIWDYIRTGEPADKAGAYGIQGRAAVFIRSIHGDYNNVVGLPVAALWQYLNSGKEENDATLMEQNKRMRILMCQNSTEGILCGVYEAFTSRYGHAWQKLAVGPYVNGDLFSDIYSVEVNTEKAGKVVKAIISKISEEAWYLVHMASEADSQEKGEIIYRFLILAFANGRKVLNAMSIPEVMGLHQLSRSVSRETQHLYGFLRFQELQNDILYARLVSKHHVGMFLAEYFQDRLPMEHWVIHDVERDEVWIHRAGEDWLYIRHPDFRQDPQMMLSSSEYAFTEWWKTFTESVAILERRNPKLQMQMLPKRYWKYMPEMFTNPGRMETIWDSHLNEKLRILADAAKYDAACTSSGVDRKNGSMGTGNAVACGICHSFSADGRCISLLKILLTNDCCYDCVYCVNRVGNDTERATFSPDEVCTLTMGFYRRNYIEGLFLSSAVYRNPSYTMELIYETVLRLRTVYHFHGYIHVKAIPGADPQLIQQTGFLVDRMSCNLELPTAEGLRSLAPNKPRRQLLKPMRQIQQQITVSKHEVALYRHAQPFVPAGQSTQMIIGATGESDYQIMSVSEALYGRFKMKRVFYSAYVGVNEDSRLPAVGTMPPLLREHRLYQADWLIRFYGFKAAELLSKRQPNFNLLLDPKCDWAVRHLEAFPVEVMTADYYQLLRVPGLGVNSARRICRARRYGGLRFEDLKKMGVVLKRAMYFITCQGRVYMPFRMDERFITTNLLGLKERLPENVVRSGDTFRQLNLFDDFHLQMPVEQEDKRQVLTGQLMIYFRGTKDIHLDHTVVALGKFDGLHRGHQLLINKLKEYGKKGFQTVVFTFDFHPMSLLTGKKQSLIYTKEERLRIVEEMGIDVLIEYPFTQETAHMMPEDFVRDVLVRDIGAKVIVVGDDFHFGYQRSGDVSFLKKHAAAYGYVVDNCEKLCVHGEEISSTMIRGYIAEGRMETVTELLGRPYEINGKVIPGKANGRKVDMRTANLAPDDIKLLPPEGVYASVVQIEGMEGKYYALTNIGRNPTVGDHNELRIETHVVEFSGDLYDRMITVRIYQRLRDEHKFASLEEVKAQVMKDQEKAMAYFKEHHIMYDGMINVCKEKGFTSHDVVAKLRGILHQKKIGHTGTLDPDATGVLPVCLGKGTKLCDMITDRDKTYRAVMMLGRTTDTQDISGQILTEKAVNVDEREVRDAAVSFVGDYMQIPPMYSAIKVDGKKLYELARAGQEVERKARHVVINALNITEIQLPYVTMEVSCSKGTYIRTLCQDIGEKLGCGACMTELVRLKVGAFDIAHAWTLAQIQEMAACGEEEVLRHIVPVEEMLSDYPEFKTTDAFSDKMLANGNWLPREQVATSGGDASAVLKDGMQVRMYSSTGNFTAIYQYVAVKNSLKNIKMFVMNNILSCLEGVRTVIIAGHTRPDGDCVGACMGLWHYLRDNYPEIEADVRLEPVPESYKVIAGVEQIIGSYEDDKVYDLFIALDASDKGRLAGAQKYFDTAKHRICIDHHISNPGYADENMIVSDASSTCEVLTGLMAMEAISYDAAVALYIGIICDTGVFKYSNTSRHTMDMAGCLMEKGIPYSDLIDDVFYRKSYKQNKILGYALQKCRPVLDNRMIVCVLEKPELDRLGAGHGDLEGIIDQLRLTRNIEVALLASASDTEANTYKFSMRSNHFVDVAAVAGKFGGGGHVRAAGFSAVGDINEIYHTAEALIKEQLDTCTMEMRKNSIKNTRINGEVQKELSRIISREIKDPRISPMTSVVAVEVAPDLKQCKAYISVLGDKDAQDATLAGLKSAIGFIRRELARTVNLRNTPEIHFVLDQSIEYGVNMSKLIDDVVRSDEGKEHEGEEDNEMSKIRVHELAKELNKSSKDVIYALKGHGVDVESHMSTISSENADKIRKFFTQSAAKPAQKQETRPAQDNRNAAPRRNNNVQGGMDSRGNYSTPSRDNGSRDGQNRGYNRDGQNRNGGRDGQNRSFNRDGNGQNRSFNRDGNGQNRSFNRDGNGQNRSFNRDGNGQNRSFNRDGNGQNRSFNRDGNGQNRNGSRDNRGQGGRNGGRDGKFNLDSAINKEVVMTKDTTRENRRNYKDNKDRDNRRDDRDFEGRNTSRNGKNNNKNNNNNSNKNTMRKKPVNAQPKPEPVVEKVTSIELPETVTIKELADKMKIPAAQIIKKLFLEGKMLNVNSDITYDEAEEIALEYDILCEHEVVVDVIEEMLKEEEENEEDLQPRPPVVCVMGHVDHGKTSILDAIRKTSVTSGEAGGITQHIGAYVVEVSGQKITFLDTPGHEAFTAMRLRGAQSTDIAILVVAADDGVMPQTIEAINHAKAAEIDIIVAINKIDKPSANIDRVKQELTEYGLIAEDWGGTTIMVPVSAHTGEGLQDLLDMILLDAEVKELKANPNRKGRGLILEAQLDKGRGPVATVLVQKGTLNVGDNVTVGTAFGKIRAMIDDKGRRVKKAGPSTPVEILGLNEVPQAGEVFIATDTEKEARTMAETFIATKREKMLADTKSKLSLDGLFDQIQAGQIKDLNIIVKADVQGSVEAVKQSLAKLSNDEVAVKVIHGGVGAINESDVTLASASNAIIIGFNVRPDNQAKIIAEQEKVDLRLYRVIYNAIEDIEAAMKGMLEPTFEEKIIGHAEVRQTYKVSGVGTIIGGYVQDGKIVRNCKVRLLRDNVVIHEGELASLKRFKDDVKEVNSGYECGMSFEKYNDIKEGDQIEAFVMEEVPRMTDKALSMIGLATKAGKIASGEFAVESAVRKGKACLVIIASDASDNTKKSFNDMGAYYHVPVYIYGTKESLGTHTGRGYRASLAVLDAGFGKSIRKLIDTGINQMKKIPMRQCIGCQEMKSKKEMIRVIKTPEDEICIDATGRKNGRGAYICPKSECLQKAIKNRGLERSLKMQIPKEVYGQLEEEMKNIDRMNEGKELIKALDDIEKEKGISKDILLEAIENSLVAACKNEYGKADNIRVTMNRETGEVKVFADKTVVEEVEDPEMEISVADARLKNKFYDPGDIVHVEIVPKNFGRIAAQKAKQVVVQKIREEERKSLYNEYYGREKDIVTGVVQRYNGKNISVNLGKVDAVLTENEQVKGEVFKPTDRIKLYIVEVKNTTKGPKVTVSRTHPELVKRLFEAEVTEVRDGTVEIKSIAREAGSRTKIAVSSNNPNVDPVGACVGMNGARVNAIVDELRGEKIDIINWSEDPAVLIENALSPAKVVSVDVDPEEKSAAVVVPDYQLSLAIGKEGQNARLAAKLTGYKIDIKSESQAYGYMAKKDYESRTEAMLMPIVEAKGFELVDVEWVKEGANWYLRAYIDKENGITVDDCEEVSRALSDLLDEEDFISENYILEVSSPGLDRPLKKEKDFARSIGKDVEVKLFKAINKEKEFVGILKAYDEDTVTLEMEDETEMQFKRSDIARIRLAFFFMKNKKYKKRIYTKSERSSSAKEYLAIIGRQLKRPIEKQDRWIDKKSAILAVVYGVVMAGLAVYAMQTAEKSQEWLWLAVVFIAAAIVVNLFRFRYSALIEILLTAFAPAAVFMLVESYTHLLSQMWDGPVILNLIMYYLFFGVLLFITGRTGMSILIGSMLLGAAGLANYFVLMFRSSPILPWDLFSVGVAATVADNFEYKLSVRACNVILLILLLWSLCLKMRLKFKMSKFRGAGIAVMCAAFMGFCGYVQTDAAIKTFDMDTTLFTPTVYYRNNGLALSFIVNLRYLKIDKPEGYSQEELAKIQDEISSGNSDSNVSADNIDLTKKPNIIVIMNEAFSDLSVLGDYTTNTEVMPFISSLSENTQKGWMYSSVKGGNTANTEFEFLTGLSMYFLPTGSIPYQQYIKSEVPSLASQLSSIGYTSVSMHPYYPKGWNRDTVYDDLGFEEKYFKDDFSNPEILRTYISDWTTYQKIISRYEEKSSDERLFVFDVTMQNHGSYVKRYSNFIPDVSVVGGSGTYLKATEQYLSLIKRSDEAFKQLVEYFENQSEPTIIMMFGDHQPADYITNVVDTGKKTGSNDAFVTSIGTGSDRKERYMVPFVMWANYDINESQGEETSANYLAVRLLKAAGLPLTDFQSYLSDLQQNVPFISAHALKENTGTDCGEEEAEALLKNYKKLLYNDLFDTKHRLQAFYSYEMKKFLNILPDLKLSHEMTELFETVECEKVAASRDHSRIKIYIHSDRLIAHKAIRETERAIRNQMFKDQVDVCLVEKYHLSRQYTPARLLEAYTGSLIDELEEEGELSANLFRKAEKTFLEPFVLELKVEENCIAQVKMEKLKHKLEHIFSERFDMPLGIVLGWLPKKKSKYAVYADSAMKEEIAQIVQTYEQAKEDQKEVEKQEVQQKEKPAFKKNYVKQRLPEDKDIFYGRNFEGEETEIHEIIDEMGEVVVRGKIIQLETREIRNEKTIVMFAVTDFTDTIKAKVFTKNERLPELLDKLKEGAFIKMKAVAMMDQFEHDIALGSVSGIKTIPDFTEKRMDHSPVKRVELHCHTTMSDMDGVTDVKKLLKTAMGWGHQAMAITDHGVVQAFPDANHCVEGKDFKVIYGMEGYLVDDIKNIVTDSRGQSLDSTFVVFDIETTGFSAVNDRIIEIGAVKVENGMITEKFSEFVNPERPIPFEIEKLTSINDRMVEDAPNISVILPKFMDFCGGSVLVAHNADFDTGFIRHNCEVLGLPYDYTYVDTLGIARSFLEGLKNYKLDTVVEAMGCTLANHHRAVDDAGATADVFVRFLERFKKKNIRDLDELNTYSAMSVDAIKKLKTYHIILLAKNEIGRINLYRLVSLSHLDYYARRPRIPKSVLAKYREGLIIGSACEAGELFRAVVDERPEEEIARIVEFYDYLEIQPTGNNEFMIRDPKMTKVSTVADLQDLNRKIVELGEKFNKPVCATCDVHFLNPEDEVYRRIIMSNKGFGDADLQPPLYLRTTEEMLDEFQYLGAEKAEEVVVTNTNRIADMIDRISPVRPDKCPPVIENSAGILRDICYNRAHELYGEDLPDIVTERLERELNSIIGNGFAVMYIIAQKLVWKSVADGYLVGSRGSVGSSFVAYMAGITEVNSLQAHYLCPKCHYVDFDSDYVKSFSGRSGCDMEDRVCPVCGEPLMKEGHDIPFETFLGFKGNKEPDIDLNFSGDYQSKAHAYTEVIFGKGKTFRAGTVGTLADKTAYGYAMHYYEEHEQHKRSCELDRISSGCVGVRRTTGQHPGGIIVVPHGEEIYSFTPVQHPANDQTTKIITTHFDYHSIDHNLLKLDILGHDDPTMIRMLEDITGVDATKIRLDDPEVLSLFHGLEALHIKPEDIGGTDLGSLGIPEFGTEFVMQMLRDTKPKAFSDLVRISGLSHGTDVWLGNAQTLIQEGKAQISTAICTRDDIMIYLIDKGVESEQSFKIMESVRKGKGLTPDYEKVMKEHDVPDWYLWSCKKIKYMFPKAHAVAYVMMGIRIAWFKIHEPLAYYAAFFTIRATAFDYGLMCQGKAAIDNHIKAYKANPNLSKKEQDTLRDMKIVQEFYARGFEFLKIDLYQSDAIKFQVVEGKLLPPFSVIEGMGGIAAEALAVAAHAETERGEKFLSKDDIRQKAKVSQTVLDTMAELGLLGGLPESNQLSIFDFGFMFDRTKAKVIRIGDRCIGGDYPIAIQSMCNTKTEDVKATVAQILALEAAGCEIIRVAVPTMEAAEAITEIKKQIHIPLVADIHFDYRLAIAAIEHGVDKIRINPGNIGSVDRVKAVVDKAKAYHVPIRVGVNSGSLEKDLIAKYGGHVTAEGIVESALDKVHLIEDLGYDQMVISIKSSDVMMCVKAHELIAAKTDYPLHVGITESGTLISGNIKSAVGLGIMLNEGVGHTIRVSLTGDPLEEIKSAKLILKTLGLRKGGIEVVSCPTCGRTRIDLIGLANKVENLVQNYDLDIKVAVMGCVVNGPGEAREADIGVAGGIGEGLLIKKGEIVKKVPEDQLLAVLKDELDHWNKMKLIVALLVFGIIVIFHEFGHFIVAKKNGIVVEEFAVGMGPKLFGVRRGETEYTLRLLPLGGACMMLGEDTAEEVIPGSFNSKSVWARMAVVAAGPVFNFIMAFVCAVIIIGMNGYISGEILQVEDGSPAMEAGLEAGDIITKADRTSVHTFSDFRMHIALNQGRKCTITYIRDGEKHQTTVTPEMTDDGVYRIGIVGGVQEKPKFGGLLISSFYEVKSNIDLVIKSLEMMIQGQVSRSDVAGPVGMFQVIGDSYESAAKYGLRSVILTIADMILLLSANLGVMNLLPIPALDGGRLVFLIVEALRGKPVPRDKEGFVHMIGFVILMGIMVLVMFNDFARIFGFMKKIAILGSTGSIGTQTLDVISQHPQDLSVAALAAGSNIVLLEQQIRQYHPLIAAVWDAKKAAELKIAVSDLDVKIVSGMEGMIEVVTLPEADIVVTAVVGMIGIRPTMEAIKAGKDIALANKETLVTAGHLIMQMAKDYHVQILPVDSEHSAIFQSLKGEHASGIRRILLTASGGPFRGKTLDELADVQVEDALKHPNWSMGHKITIDSATMVNKGLEVIEAKWLFGVDLDQIQVVVHPQSVIHSAVEFQDHAVIAQLGTPDMRLPIQYALFYPERKPLQSEALDLFKLHTMTFEEPDLGTFRGLALAYEAARRGGSMPTALNAANEKAVAMFLDRKIRFLDIPEIISECMAAHQWIDHPSLEDILETEQWTYRYIESRWMFITRLISGVIVLAIAVAAMLLGGNILFAFVALISMIGLFELYRASGIEKKGPAIAGYIGALLYEMLLWAAVPEGELMAAAVGTLLIMAVYVFSFPKYKVNEIFCAVAGLAYVVVLMSFIYKVRMLNDGLYIIPLIFICAWGNDTCAYCVGMLIGKHKMFPRLSPKKSVEGFIGGIAGAVLLGLIYGRIFGAHLISLNVPMRDCAIIAGVGALIAVVGDLAASAIKRDTGIKDYGRLIPGHGGILDRFDSILFTAPVVYILAVCLGAMERIIDGETLNVPEHVAIILDGNGRWAKKRFMPRNYGHMQGAKTVEKMCEVARDLGIKYFTVYAFSTENWKRPQSEVDALMKLLRKYMVDSLERTAKNNMRVRVIGDKTGLSEDIQKSIADVETASAGNTGLNFTIAINYGSRDEMIRAMKKMLADGHTNPDEMSEALFEHYLDTAGMPDPDLVIRTSGEQRVSNFLLWQMAYSEFYFTPVLWPDYNKETMIEAIRAYSKRDRRFGGVMSNEKLQPYETKMQKSLDALEREYTTIRAGRANPHILDKLKVDYYGTPTPLQQVGNVTVPEARVLMIQPWESKLIKDIEKAILASDIGITPTNDGKSIRLVFPELTEERRKELAKDVKKKGDAAKTAVRNIRRDGNDAFKKSNKAKEISEDEYAELQEKLQKITDKYVAMVDKAVEAKTKEIMTVMMMNDLKRILLKLSGEALAGDKDFGFDEATCLKVAEQVKQITDKGTQVAIVIGGGNFWRGRNSSKIIERTKSDQIGMLGTVMNCIYVSEIFRTLGMQTEVYTPFMCGAFTKLFSKDAAVADLNAGKVVFFAGGTGHPYFSTDTGTTLRAIEIEADAILLAKAVDGVYDSDPKTNPNAKKYDSVSIQQVVDERLQVVDLTATIMCMENKMPMVVFGLNEENSIVKTLYGEFTGTYVTVMRECLTDLRSARNPKARIKILEGHFATVNSHINTYIDMSTVKCRHNNGRETARVLANHFQNNTMIDTIVCLDGTELIGAFMAEFLADTGIMSVNSGKNISIITPDVNAYGQLVFMDSTLRMIKHMQVLVLAASVTTGQTITRAAEAVSYYGGTVRGVAAIFSNVEQTAEGMEIFSIFQKEDLPDYQAYLPSECPMCRKKMPIDAIVNSFGYSKLMKISTRGRYALRMMLDIATNDHGEPVRIKDIAARQDISVKYLEQIVSVLTKAGYVKSIRGPQGGYRLARLPKDYTVGMILRLTEGDLSPVSCTDSNYDCPKMQDCVTIRIWKELDEAINSVIDKYTLEDLLDWQDAKGNDYVIMIRETIQNVVANITETCMNEDVYVTDEESIHLPSRGAIIGIIKDLRRVVFPGYFGDENISSTMPGYFLGNMLTHIYEELKAQIEIAFLYDDKGKSSSAEVTEKAREICERFISRLPYIQKMLLMDVQAGFDGDPAAKSKEDIIFSYPGLFAIYVYRIAHELYVQNVPFIPRIMTEYAHGKTGIDINSGATIGRYFFIDHGTGIVIGETTEIGDYVKLYQGVTLGALSTRKGQQLAGTKRHPTIGDHVTIYANSTILGGETVIGCDSIIGGNSFITESVPAHTRVSIKSPELTLSMRFNPFEEKPMPLDQLFMDWDKLYPKPYHLGTVHPYTKVRIVLMNGTEFEAQWFGHQFSRHCQDNDLRRELAMIRRIEQMQQKRISCLKPKNETVLEHTITYEQLAVDLTAFLARRENDCNVKTALDFALLEDFDHLYRYANLLDYEYGTCPEKLVGRYTEMTPARPTIAHHRYPTDSIFRSIDNQTASLKTKLGINIITAAEQQTMNYYMNIAPFYSRSDLGRRLYQEIGMIEEEHVSQYESLKDPSATWLEDLLMHEYTECYLYYSCMMTECDLYIRKIWEECLMQEISHLHKAKELLEKYENKSWQQVIGGCGDFPDILVLGPNIDYIRHIIATTTGNTQKEEDVVPLGRLSENDPFFFYQHVMNDPLCEVASHVTIDARIRRKGCDYRFEIKENPLPELRNRRCDNTSIGRIPACTPASASSEGTTADNCRCPIFSKMSKVILTGDRPTGRLHVGHYVGSLKRRVELQNSGEYDKVFIMIADAQALTDNADNPEKVRQNVIEVALDYMACGLDPAKSTLFIQSQIAELCELSFYYMNLVTVSRLQRNPTVKSEIQMRNFETSIPVGFFTYPISQAADITAFKATTVPVGEDQSPMIEQTREIVHKFNSVYGETLVEPKILLPDNEACLRLPGIDGKAKMSKSLGNCIYLAEDPKDIKKKVMSMFTDPNHIRIEDPGSLEGNTVFTYLDAFCNDQHFEEYLPDYKNLDELKEHYQRGGLGDVKVKKFLNNVLQEELEPIRKRREELQKDIPYVYEVLKKGSEVARETAAQTLHEVRDAMKINYFDDMELIRSQAKKYEMIRRIITIDTEKCTGCALCVNACHEGAIGLRDGKAVLLREDYCDGLGDCLPACPADAIHFEEREAAAYDHEAVQKHLAARKHAAAGGCPGSAAAFFGHEHTEKPQADTVSSTSALAVPESQLSQWPVQIKLVAPNAPYFNGCDLLIAADCTAYAYGNFHQAFIKDHITLVGCPKLDAVDYSEKLTQIFTYNDIKRITLTRMTVPCCGGMAMAVQKAIQASGKNIPLKIVIISPDGQIVQTQEVMDAEMKGYRTGINDGKERSSGPDWLRYADIIDKQHHVSKKHPPMSMEDRAAQFSPFAALTGYEAAVKETARLTDDREELDEDEKTRLNAQLQKISARLQEQPEVMVTYFAPDERKTGGARQTYRGRLRKIDRNRKMLIMVDQTELPIENLLNIECEMQKKTYIAIDLKSFYASVECVERGKDPMTTCLVVADPSRTEKTICLAVSPALKAYGILGRARLFEVVQRVREVNAARRRQASGHELTGSSSDANVLKYSSNMALDYIIAPPQMAHYMEVSTQIYQVYLKYFAPEDMHVYSIDEVMIDATQYLALYQMTARELAMKVILDVLVTTGITATAGIGTNLYLCKVAMDIGAKHTKADVNGVRIAELNERSYREMLWNHRPLTDFWRVGRGYARKLEEVGIYTMGDIARCSMGGPDDYYNEDLLYRLFGVNAELLIDHAWGWEPCTMAAIKAYKPRSNSLGSGQVLQCPYVFDQARLVVREMTDMLVLDLVEKRLMTDQLVLTVGYDIDNLTNPEIAKAYRGAVTTDRYGRKMPKHAHGTVNLKGASSSSKVILEAVMDLFDRIVNPKLLVRRIYVTANHVADEKTVSMKTEFEQMNLFVDYAAREAEQKAESERLARERKLQEASLAIKKKFGKNAILKGMNLEEGATARQRNSQIGGHKAMYRTIDYLGVIWLKNKAAVFMIKYMKRQLSFCSYIVICSVKWMMAVTNRHLCDRDFLEQIEFLASTDIDAIILREKDMTPDEYEHLAKDVLMICHEHHKKCILHSFAEVAAKLNCENIHLPLPVLMELSEKDALEGFKHIGTSVHSVEDALAAEKAGATCLTAGHIFDTDCKKGLPGRGLTFLENVCHRTKLPVYAIGGITPENLEVVRHAGAVGGCMMSLSMKIREMGNEEYIIQWDDMTPEAKAKKERLEQDPSFRTDHMAYMEGMDQISTDIRDKVMSQVESYDEKVYTAADVQAALAHDVCSIEDFKALLSPAAQPFLEQMAEKAAVERRNHFGNSVYLFTPLYIANYCENYCVYCGFNCYNHIHRKKLNMQEIEHEMKVIADSGIEEILMLTGESRHMSDVKYIGEACKLASKYFRNVGLEIYPVNVDEYKYLHECGADYITVFQETYNSDKYETLHLMGHKRVWPYRFEAQERALMGGMRGVGFSALLGLDDFRKDALATALHVYYLQRKYPHAEMSLSCPRLRPIINNDKINPKDVHETQLCQILCAYRIFLPYAGITVSSREVARFRDHIIRFAATKISAGVSTGIGDHEEKYTGKENEAESGDEQFEIADNRSLQEIYDAIKNQGLQPVLNEYIYVMQNKDTWTLGGHTFTSRFILGSGKYNLNLIRAAVEDAGAEIITLALRRVNTRKEENILDYIPEGVTLLPNTSGARNAEEAVRLARLAREMGCGDFVKVEIMHDSKYLLPDNYETIKATEILAKEGFIVMPYMYPDLNAARDMVNAGAACIMPLASPIGSNKGLATKEFIQILIDEIDLPIIVDAGIGRPSQACEAMEMGAAAIMANTAIATAGDIPAMAGAFKNAIAAGRAAYLSGLGRVLHRGASASDPLTGFLHDMQSIVNGNSDREQLSFRKAKAKVKVKAEVKVRTKVNAEAKIKAEAKTKMKVGNNYAEMAEIILNGQSVKTEAADMEDLKRQTYASEGLSEDIQRHCVWIVEGFQTDENLSLKDGMTINWIQKGKMPDREEMESMLCARHTPHVYEKAKKARVAIAGLGGLGSNIAIMLARTGIGHLHLIDFDIVEPSNLNRQQYMVEHLGMYKTEALKDELQRMNPYIEVQIDTVRITEENCRDLFKDDDIICEAFDKPDVKAMLTEQILCYYPEKTLICGSGMAGYGSSNTIKTRKINDHFYICGDGVSGAMPGRGLMAPRVTICAAHEANMVLRCVLGLDADEIMIKVNGEMLEIAEGTTVAAFLKEHGYPDKMIAVECNGAIIPRSIWEEAILKDGDTVEVVRFVGGGMTLITTNPSPRHKRAPILTFSVFAKVPCKHELWLITRVKKAAQRTTPVVVYPFMRLNIKIHNHSHNSHKPNELLHSDLIITFFNYLSTPYSACIPSKTYFVRHKTLTFPKQKPYQTFPVNPPIYYTKSRNCSLFSHFILIKILLRVIILSEMYQIITDGSWDMGSERATRFGVDVVPYYVTMDGEHYLKEIEELDVRDFYQFMVDNPKIFPKTSLPTVQDYYDVFEKYAKQGIDIICFTLSAKFSGSYNSARNAGNMIQENYPGIRVTIMDTTLATLMQGLMIQEIVRFQRSGADYDALIKRADEIKDTCRIFFTVENMDYLVHGGRVGKLAGISANILNLRPMILMTQGELFPSGLARGRVQSRKKAMEKLFAHIEENGNDPDRYIYMVGYGYNIKEGEDLRKDVIEHMKKKWPGFEPTVEIGQIGATIGVHTGPHPIGFGLCEKSCMAHVKIQYDVMDAFCMDVFQRFGFTKEESRIISDVLLLSDVYGIESHGAQRLVRYHKGIASGMIKVHAKPEIVFETPVSAVVDGHDGMGQLIGHFAMDLAIKKAKEIGMAIVTVRDSNHFGIAGYYAKMACDQGLIGMAFTNSEAIVVPTFGKKAMLGTNPIAISMPAEPYPFFFDASTSVVTRGKFEMYRKAEKPIPDCWGLDANGHPCTNAAEVLTNIDKKAGGGIMPLGGAEELTGSHKGYGYAMLCEIFCSILSMGLTSNHSIQNGKGGTCHGFIAIDPAAFGDAEAIKQHLSDFLTELRESPKADGKERIYTHGEKEILATADRMKNGLDVDVKTLAEMKDLSEYVGADFNSYFGDIYNGMKEVIHTSNAPAAIGPYSQAIKAGGAIYVSGQLPVDPATGAFAGDTIQEQTRQSLTNIKNILAEAGTDLDHVVRVDVFMKDMNMFADMNAVYAEFFTEKCPARAAVEVARLPKDALVEIGAIAVVDMLEIKNIYKTFNAGTVNEKRALNGLSLNLEDGDFVTVIGGNGAGKSTMLNAIAGVWPVDEGQIIIDGVDVTKLSEHKRAKYLGRVFQDPMTGTAATMGIEENLALAQRRGQSRTLKIGITKKEREEYKELLKILGLGLENRLTSKVGLLSGGQRQALTLLMATLKKPKLLLLDEHTAALDPKTAAKVLETTDMIVNRDHLTTIMITHNMKDAIAHGNRLIMLMDGKIILDIKGEEKKKLTVEDLLHQFEKASGEEFANDRALLSMNIMALISALPGAAAQGLIWGIMAIGVYITFRTLDIADLTVDGTMCTGGAVCIMMMMNGHNVWVAMLAAFIAGMLAGLATGFFHTFMGIPAILSGILTQLALWSVNLKIMGKSNQALNVDKYNLLVSLRYIKGVPIFKNTIVIVAIMIVVLIAILYWFFGTELGCSIRATGCNSNMARAQGINTNFNKVLGLMISNGLVALSSALLAQYQGFADINMGRGAIVIGLAAVIIGEAIFGRIFRNFALTLLRVGFGAVIYYLVLQVVIWLGVDTDLLKMFSAIVVAIFLAIPYWKSRYFAKPVRRGGSADAMKKMKKVLAVALSLVMAGSLAACGSSSTETKAPETGASETAAESTAESGSEAASEVSTDGKVYNIGICQLIQHDALDAATKGFEDALTEAFGDNVKFDEQNAQGDSATCATIINGFVSNNDDLILANATAALQAAAAGTDTIPILGTSVTDYGVALDIDNFDGTVGGNISGTADLAPLDGQADMLHELFPDAKKIGLLYCSAEANSKFQVDTIKGYLEKLGYTCEYYAFSDSNDLSSVCTSAANDSDVIYVPTDNTVANNTEIVNNICTPAGVPIVAGEEGICKGCGVATLSISYYDLGVATGKMAAKVLQGEDISTMPIEYAPTFTKEYVASRCEAYGITVPDDYVALEEMSSRESYTSVINRKAAVKQQLMNVAMGRERADLVLKNAVYVNVFTNELSQGDIAVKNGVIAGIGHYDGVEELDMQGKIVAPGLIDAHIHLESSLVAPSEFVKAVLPHGTATVITDPHEIANVLGTDGIDYMIQATEGLPVEVRFMLPSCVPATPLDESGARLDYQAIDPFYDYDRVQGLAEMMNYTGVIQGDTEVLQKIAAAHKYHCRIDGHAPGLSGRELNAYVASGVYSDHECSSMEEALEKLSRGQYIMIREGTAARNLRALAGLLVPQYYEHCMFCTDDKHPNDLLHVGHMDAIIREAVQKYKVDPIIAIKAATHHPARYFHLVSRGAIVPGYQADFAVFDNLQNLHVEMTVIKGHVWYHDGQLEDVPVPEVDAWLSDKAHHTFNLDRLTSDSFEDHRPRGVIGMVPGEIVTTDAGYASAVDISKDILKIAVIERHRHTGHIGIGYLKGYGLKEGAVATSISHDSHNIIVVGSNDADMAAAANRIVENNGGIAVVKNGQILGEVVLKIAGLMSDKSLTEVNDALENAKKQAAVLGVSEGIDPFMTLSFMSLPVIPELRLTTRGIIDVARQQYIMKMMKNAIVAQSGGPTTAINASLAGVIKGCLESHEIDVLYGALNGVEGLMDERLVNLTDIFDHNEENLNVLKLTPAMYLGSCRRKLKDVDQDSSEYDIIINIFRKYHIHYFFYIGGNDSMDTVGKMSRYVKEHQMDVKVIGIPKTIDNDLVVTDHTPGFGSAARYVAASVLEMAHDTYIYNTKSVLIAEIMGRDAGWLTAASVLARNSYSRAPHLIYLPEHPFSKEQFIEDIKAQFKQREHIVIAVSEGLRDGDGHYISAETAAVDAFGHATLSGTGKCLEGLVAEKFGCKVRSVEINVLQRCAAHMASATDIEESWQLGLKGVALALEGKSGEMSIVCRISDEPYQVIYDGADVQQIANAEKKIPTAWINEAGNDVTEEMVRYLRPLIHGSVAVPEQDSMPHYLFLGEALMPRHLLNPMDFSVEELDQLMDLAADIEHNPAKYAHACEGKTLATCFYEPSTRTRLSFEGAMYHLGGHVLGFSSAASSSASKGESVSDTIRMIGCYADICAMRHPKEGAPMVASMKAKIPVINAGDGGHQHPTQTMTDLLTIRSLKGHLNNLTIGLCGDLKFGRTVHSLIEALSRYEGIRFLLISPPELRVPEYILEMLKQKNIPYTEVQSLDDAISELDILYMTRVQRERFFNEDDYIRMKDCYILDKAKMALAKEDMLVLHPLPRVNEISVEVDDDPRAAYFKQAQYGMYIRMALILTLLEIKVEVMLNISGLDNGIVLDHIPAGMSMEIYKYLNLGKLDSQVAIIKNASSKKMGKKDIIKIAGGLDSIDLDVIGFLNHKITVNIITNGKISEKKTLHLPKKLTNVIHCKNPRCITSIEQELPNVFLLTDPETATYRCKYCEEKYTKMKWHELTEKTGYVSIGNAFVPGYFLTENELVLIDSGPIQSKRLMELLDERHWRVRAVIHTHVHIDHVANDLLLLEKFPDILFYTSKDEADAIASPEDMMRSMGFDTAAHAKEAQAVYYPEKLHIIGVDMKRPEIMIDGEIFELISLEGHSVGHVGVVTPDGICCLGDAIVSEDVLNVSKLPYMANVQKSLASMEKVRSLNYEIYVIAHQSVEKKASMDKIVTDNIAKEHQLSRIALEVLTRPMTREEVLAKYMKTLHINQREGLSMVIIAHSAWTRYIDLMAQGRIVYREGLLFRKDELDTAQTMDLKGRHLLKLLDFTPEEILYLVDHADELKAKKKQGIPTLNHPGKNIALIFEKNSTRTRCSFEVAANDLGMHTTFLDPSASQIGKKESIADTARVLGRIYDGIEYRGFDQSIVDDLAKYAGVPVWNGLTNQFHPTQVLADIMTIREKFGYLKGIKMTYMGDARYNMGNSLMVVCAKMGMHFTACTCKEYFPDADIVAQCEAIAKETGGSITLTEDVEAGTKGADVIYTDVWVSMGEPDEVWAKRIKELSPYQVNKKVMENAGEKAIFMHCLPAFHDLKTTIGKEIGEKFGISEMEVTDEVFESAQSVVFDEAENRMHTIKAVMDATLMQIFVDADACPVVAIVEKVAKMHAVPVTLLCDTNHVLSSGYSKVIVVGAGADAVDYKLISICRKGDIVVSQDYGVAAMALGKGAYAIHQSGKWYTNDNIDQMLMERHLNKKARRSTHKSHMKGPRKRTPEDDERFAQSFEKMVLMAQENEDMCGRYYIDTNWLDEIGNVVYSFDIDWKICKEQFQGDILPTNTAPIIEKTEHGLQLSLCKWGFPLQKGKNLVINARAETVLDKPSFSNGIWYHRIVIPASGFYEWNRLREKNTFTRSDASVLYLAGFCDWFDNERRFVILTTAANESMIKVHDRMPLILEKEQMEDWFDNEKMQVILRQEPVMLKRQAEYEQLSLFSMLNIYYGNMKESVYNTAAYFKYDYEDSWIVDSIERAVYMGVYLAEPIADTIAVCTTASMFYVYYRKLKAVDLAEKENIVMRKYVRLFALAVLAGAAIGIGGIVFLSLENKIVGALMFTAGLYSICVHGLNLFTGKVGYAVEQPKAYIIDLVIIWVGNLAGTWLAAMGVLGSRIAGISEKAQSMCQIKVDDSLISLFILGIFCGALMYIAVEGYKQTKNPLILFVCVAGFILCGFEHCIADMFYVSVAQMWSTRAFLCVVVISLGNAVGGMLIPACKKIMKYQYITIEREFGSGGTRIGELLAKECKMPCYGREILERVARKYDISVEQIEQYEEGVTNSFLYTVFVMSKAQSGDMNMLSDEGKVYLAEQAAIQSLAHNGSAVFMGHCASEALKDRKGVVKVFIHADDAFKQKRIQEDYQISPNRMEFVRKKYDKKRANYYRANTMKRWDDYRNYDIVLNSGELGIEGCVKVLKSLLVMENRNNRGGMRGPGMGRRPAEKSKDFKGTWMKIIRYCKRYLAVIVVALICAVAGTILTILGPDKLSDLTKVITEGIATGIDMERVKSIGLTLVVFYVGSAILSFGQQFIMATVTQNVTKQLRSDISVKINRLPMAYYNKTSTGDVLSRVTNDVDMISQSMNQSIGNLVSAVALFFGSLIMMFKTNVIMTLTAVIATMIGFGLMSLITSHSQKYFSRQQANLGALNGHIEEIYSGHTVVKAYNGEKNAKKVFDELNNNLRDSAFKAQSLSGLMQPLMAFIGNFGYVAVCVMGAVLTMKGYIGFEVIVAFMMYIRLFTQPLAQIAQATQSLQSAAAAGERVFAFLGAEEMSDESDKTEKLGKAEGYVDFEHVKFGYEDTDKIIIHDFSAKAKPGQKIAIVGPTGAGKTTLVNLLMRFHEIQSGDIKIDGISTRDMKREEVRSQFCMVLQDTWLFEGTVRENLVYNTENVSEEKIEAACKAVGLDHFIRTLPHGYDTILNDQVSLSQGQKQQLTIARAMIADKPMLILDEATSSVDTRTELQIQKAMDALMQNRTSFVIAHRLSTIKNADLILVLKDGDIIESGNHEELLAKGGFYADLYNSQFDQASMIKLLKKLTKKDMALAGLAFLLILAQVYLNLTMPDYMSDMTVLVQTEGSAMADILAAGGKMLLCAVGSLLTAACIAVCAAKISANFSANLRGQVFNRVQSFSMEEIGRFSTSSLITRSTNDITQVQMVLVLGLEVFLKAPVTAVWAICKIAGKSWQWTATTGIAVIILLCIVGICVMVAMPKFRKLQILTDNINRVTRENLTGLRVVRAYNAEDYQETKFEKANDELKRTQLFANRTMTILMPGIMLVMNGLTLAVYWVGAYLINDAGMQDKLTLFSDMIVFSQYAMQVVMAFMMLVMIFVLVPRASVAAKRINEVLDTEPAIEDGAKTEAKAGMTGEVEFRHVSFKYPDAEKNVLEDITFTAHKGDTVAFIGSTGCGKSTVINLIPRFYDATEGEVLVDGMNVKEYTQEALRNRIGYVSQKAILFSGTVAGNVAYGENGGKPADREDIIDAVHTAQADEFVEKLPDTYDGFVAQGGSNLSGGQKQRLSIARAICRHPEIMIFDDSFSALDYKTDRILRKALDEKCGDTTRLIVAQRIGTIRDADKIIVLDEGRIAGMGTHDELMKNCEVYRQIAFSQLSKEELAMEEQLNMMHRGRQFKQLMNKKMDGIIREYDVKRVEIEILRFLAMSGERNTAADIHRYLDLNKGQISKTLEHLCTMHYLESMPDKKDRRYMHYILSEEAKELVRRINAIWDDMHQQIMSGIQAEDRAIFNKVLKHAMANMERMIDEASVMSLGRRLTKILSQRICQIKNSPDKSLKKPPETVYNITDHKYSPPFNTDQTMSVFMKAVEVRNIKIGEGIPKICVPIVGVTKEDIINEAKTFENIPVDVVEWRVDWFENVFDIEKVKDVLTDLRQVLKDTPILFTFRTSKEGGEKAIEVADYAKLNKEIAATGNVDLVDVEAFTGDEVVKEIIEAAHACGVKVVASNHDFDKTPDKDDIVGRLRKMQDLGADIPKIAVMPQSKLDVLTLLSATEEMNRLYADRPIITMSMAGTGVISRLCGEVFGSALTFGAAGKASAPGQMGVNDLNTVLNLLHKSLMWQQSLAEFKQVRFLVIYPVISVVMLVLVYLVKTPMICFVGAFVIGYAAAGGVLQMATATENDLFPNIKGTITSLVMIASSLCNYTILSAAAKMSSMQVIMLNIVITVIGVLLAVFVNVRYGSLLAKTEQMRLYRMELYKLYHNKIFRIGLFAATALLLAYFWFAEVGGEMAAVDGSVYSGYEAVKMNKKITKEFEGELTDEKVHQIVEKYGLPSKLEENMPGWRDGNFLNDFVTRYFTNGAWENGITPTERYMIAETELGENCEKLGITPYLTYTTGWKIFVEMLQFGLILGSILVICSVSTIFAEESQTKMLPLIFSTEEGRRKDVMAKIAAALTFTISIFLWFAVINLALCQVVYGLNGFNNIAGLVLSESIRHQSVMFSKYLAVLLMLALEALLSLCAITLCVSAHQNSSFGAVIISAACWGLPVIIRIFFGGFMALIVDAMPVFLIMTNMVKDIYNIWQPVFAINIILAAVCLAEGTIAYKNRQIAMHELKLMDVWKRYKDKDAVREVDYTFTNGVYGLLGENGAGKTTLMRLICGVMQPTKGKICCDNLEISGMGAEYRKLLGYLPQDFGFYPDFTAERFLRYMAALKALPKDDAEKRIEELLTMVELKNVRRKKLKTFSGGMLRRIGIAQTLLNNPEILVLDEPTAGLDPKERVRFRNIISSLGKDRIVLLSTHIVSDIEYIADRILIMKNGELIQEGTEAELTEKVKGHVWKCIVSEKEAECLGQRFVVSNMRSNGENIELRVISEKQPMREAELLEGTLEDAYLYETQSAEETMTMGDSEIKNLFVRANAQVHIDEARKQKTHQAMMMEMEKQKINKRRIEMRMSIKNILLQQFQYMDKLFFYIYGGLICLGIIFIAVLQYTGVSQNEIITVCMAGAGILSITSIGVIDKMFFGKMAELGASCYFNTKQCVAAWMVISGMVNVVVLFLLAGYLNGFWRVGLLQVGLYILTPYLLSGMIALDILSMETGKKHSFLFVISGFLMSIGYGVIGAIPGIMFTAANRIWTAVFILSLLLFVIQIKRLFNRMEKGDVLCMNMNLAVCFFAHSELFLFYNGYIIGTGIWLGENTMEDSELVQKLHNGDKEAAGLIIERYYADIYRFCLYMVQYEEDAYDITQESFLKFIKYGTSYHHQNLRGYLLTIARNLCFNYFRDKKDIESSVEWEVFDKLPKPGNQITETEDIIYLQNLLKALSPDIREVVVLRMYEEMKFKDIADMMGCSVSTAKSRFRLGISQLKRMMEGEHDDGRMFAGGTISEGELKARYERYKNIIDNFTLMSDIFMRNVFKKKECLEYVLQIILQNHKLFIAEHIIQKDYKNLQGRSAVMDCVARDADGQYFNIEIQQENEGASPNRARYNSGLMDMNMLNPGQDFDELTENYVIFITRNDILGYGLAIYHVERVILEVDGFFGDGTHIIYVNSKIQEDTELGRLMHDFHCKKAEDMYSRILADRVYELKETQKGVEFMCQEMEQIYYEGEKSGELKARKETAMLLVEDGMDISRIARLMKVTEQDIHEWIDESMCIAKMVYTCQYQSPMGDILLAADEIGLTGLWFVGQKYFANILPDEHIVRETPILAESKRWLDVYFSGEEPNFTPPLHPIGSAFRQEVWQILLQIPYGQTTTYGEIAGQLAEKHGMDHMSAQAVGGAVGHNEVSIIIPCHRVVGANGSLTGYAGGIDKKVRLLELEKTDMTKFFIPKRGTALMYFEYGENEITYLRNKDKKLSEVIDQIGMIEREVDTDLFSAVVHHIIGQQISTKAQATIWQRMKETLGEVNAVTILSADISKLQSLGMTFRKAEYITDFARKVHEGVFDLETVAQMSDEAAIKELASLKGIGVWTAEMILLFCLQRPDIFSYDDLAIQRGLRMVYHHRKIDRKLFEKYRRRFSPYCSVASLYLWAVAGGAISGMRDYKPKTQKKMKELDLLRQELLSCDTQLVDILMKRFDVVEKIMALKEKNQMQILQPEQESRQKEALDIELKGNVHQEEIADIYARVLYNSKKIQGKKLFDYNIVLIGFMGAGKSTISAFLRDALAMDVVEMDQVIAEQQGMSISEIFETYGEEYFRNLETQLLIDMQSKQNVIISCGGGVAMRERNVAEMKKNGKVVLLKADPQTILDRVKDSDERPLLNGHKNVEYIADLMEARRAKYEAAADIVVQTDGKSALEICEEMIHKLRSADEMKVLIVGGGGREHAIAWKVAESPLVDKVYCAPGNAGIEEVAECVPIGAMEFDKLVAFAKEKAIDLTVIGMDDPLVGGIVDAFEAEGLRVFGPRKNAAIIEGSKAFSKDLMKKYGIPTAAYENFTDPQAALDYLETAKMPIVLKADGLALGKGVLICQNLEEARAGVKEIMEDKKFGSAGNQMVVEEFMTGREVSALCFCDGTNIVPMTSAQDHKRAKDGDQGLNTGGMGTFSPSPFYTEEVNAFCMEHIFKPTMAAMKAEGRDFVGILFVGLMLTEDGPKVLEYNARFGDPETQVVLPRMKTDLVEMFEACIDGKLAEKHLEFEDNAAVCVVLASDGYPVSYEKGYPITGFEKFHADEGYYCFHAGTKRNEKGIVTNGGRVLGVTAKGTTLKEARANAYKATEWIEFDNKYMRHDIGKAIDEAMLKIAVLVSGGGTNLQAIIDSIADGRITDTEIKVVISNNPKAKALERAAKAGIEAVCISPKQYADRELFNDALLEAVNARGVDLIVLAGFMVVVPEKMIKAYRNRMINIHPSLIPSFCGTGYYGLHVHEAALKRGVKISGATVHFVDEGTDTGPIIMQKPVEVRPDDTPEVLQRRIMEQAEWQIMPKVIDLIAHDKVHVKDGRVFVEEWTSRLQVCNVTLNPVSEFVSMDYKNAGVDIEAGYESVELMKKFVKGTMRPEVLGGLGGFSGAFSLENIKKMEEPILLSGTDGCGTKVKLAFLMDKHDTIGIDAVAMCVNDVACAGGEPLFFLDYIACGKNYPEKIATIVSGVAEGCKQSGAALIGGETAEHPGLMPEDEYDLAGFAVGVVDKKDLITGENLKKGDVLIGIASSGVHSNGFSLVRKVFDMTKESLDTYYDELGTTLGEALIAPTRIYVKALKAVKDGGVTLKGCSHITGGGFYENIPRMLPEGVHAVVKKDSYEVPAIFKLIAEKGDIAEQMMYNTFNMGLGMVIGVDPADVDKTMKLLEEAGEKAYIVGELTEGEKGVTLCMEKMMDRCGLFGMFDNNGFHTSHLIYYGLFSMQHRGMEAAGICVNDNQGNFSYVKDEGLVTEVFDEMKLEKLQGHAGIGHILRYDGSDARENAQPIVIRYTSGHMAVALNGGLTNIEEIRHDLELKGSVFQTMEAAEVISVLISRARNNYPTIEEAIASIMPMLKGGYAMLVMTPRKVIGVRDPQGIRPLVLGREDHSWFLSSETCAFDELNVDYVRDIQPGEIVVINAEGPHSIQGMPAQPIRACIYEYIYYSHPASVFGGQEVYKARYNMGCHLAKEAPAEADAVVWVPDSGLAAAAGYADTLGIPMVDAFVKNKYYGNNLVKPEGILFDRKIHMKLSVIKSQVKDKNIVVVDDSMVRGTTAQTLVELLRHAGAKSVHLRIASATISHPCYYGASMPEEKKLIFHEQGVDAVCKMTGADSLAFLSSEGMVAACPDAAGGFCMACFNGDYPTKMSVKVGIIMGSDSDLPVMSKAAEILDELQVPYELTIVSAHRTPDRLCEYAKTAEEKGLSVIIAGAGGAAHLPGMTAAMTVLPVIGVPVQTKALGGVDSLYSIVQMPPGIPVATVAINGAQNAGLLAAKILATEDAALRERLKAYSSKLEQTVLNKADKLEHIGYEAYLKEMMHKIGIIGGGQLGKMMILDAKRLDDYFVILDPTLHCPAHSIADEHIVADFDDVAAIEELASKVDVVTYEFEHISVKALQQVEAKGCPVYPSSETLLHIQNKYDQKQWLMSHGLPVPDFRKADSYEQLVEDCDYFGYPVILKTCTGGYDGKGNAVIHTREDIREAYESLGAGRLPLMVEEYVPFLKEVSILVCRSTNGDVAVFPVAENVHVNSILDETTVPADITEACREEAMDVARKAVHAFNAYGMLCIELFVTKDQHVLVNELAPRPHNSGHYTIEGCVTSQYENHIRAILGLPLGSTELIRPTVMKNIIGNVNKKAEVHGLEEAYKYPEVKIHIYGKEECRVGRKMGHITVTDKTIEDALFKARYAHSKIKFMRKVSIVKKEVNREEVQAWVQERFELSVTRIRGIAKEHAAASPFGDYFNSQAAFILHVENIYKMRQDGGFERLTTEALAEMNHCFYADILPETEMWEGETGYEKSYANPQWSTAMLGADYGPMMAWLVTEIRGLIPLAFQGRLADMTAINELFIEIYNRFENRIPERDEILQIIYWYVSDYSDQTVTGRTREKLDPALSFYRDIIMKADLTDLSYLYQYGEYISDNEKSIAAYLNTLDQSVIDDMAATFVNGYVRGFELYKIDLSAKKNVQLRANIGFERVLRSTIRQFEALGLSVIVCRDAIHSINKTAGKLGLVSCSANPQYDYDHRMDKGLYLDKALCERIIGVTKSAYEQYADLAEDYAGPAWMDVFGETPFEPAAKEENIRLSDKQQKLAVRMAGQMTEIVNQYIDASAISFSIIAWPLPSIGDRFEAIMDETIKVNNLDNDLFRSIQQKMIDAIDGAEYMHITGMNGNRTDLKVALWQLQDPAKETVFENCCADVNIPVGEIFTSPVLAGTNGTLHVSSVYLNGLNYRNLSLRFEDGCVAEADCSNYEDREENQKYLRQNLLQNHETLPMGEFAIGTNTTAYAMARKFDITQLMPILIMEKTGPHFAIGDTCYSHSEDHKVYNTDGKEIVARENEKSRLRDTDPEQAYFNVHTDITIPYDEISAITACFADGRQVDIIREGKFCLEGTEALNEPLNIMARNIYSFIKIEKRQTKRGIYASAFGIASLICMAVLTIASFVKAGNLPAFVGGIGYLSLLAAVFGLWLSVQLRKDNEAYGTMVHGAFYINLASVMIHGLIFLAGCLSIIMMSRQTKRCIKFGSFVLLILYIAVLIYVCFLSEDYGRDVVTSYYRYNFIPFKEIRRFYIYRDVVGIRAFLANLFGNVLAFMPFGFFMPILRLRLRKWYCMLGMTFLLSLMIEITQLLTRVGSFDVDDLILNTSGGILGYLLFYIINKVRRKWNGAMYHLDTSVDMERTAKMRIEDKISKLMCQTGACSLVLGILSVIGGLVLGIIGIVNGARLLRHHSDLMMEQYKEEFIHFMVEADVLKFGEFTLKSGRKSPFFMNAGAYVTGSQLKRLGQYYAKAIYAKYGDDFDVLFGPAYKGIPLGVVTAIAFSDLYGKEIRYCSDRKETKDHGADKGNFLGSPLKDGDRVVMIEDVTTSGKSMEETVPKVKGAADVTIVGLMVSLDRMEVGKGGVKCALDEVKDLYGFETNAIVTMAEVVECLYNKPCNGKIVIDDKLKAAIDAYYEQYGAKEQMKYDFTSIIDRQGQDAMAVDGLGMYPGMSPSKPKGGFDFIPMWVADMNFPTVPTIPEAIIERAKHPAYGYFAPRDTYFDEIIKWHQKRNGVNGLKKEYIGYENGVLGGILSALQCLAAPGDAVLLHSPTYIGFTASLKNNGYKMIHSELKKDAEGIYRMDYEDMEAKIRKYHIHAAIMCSPHNPTGRVWEQWELEKAMAVYEQYAVTVISDEIWSDIILDGQKHIPTQQVNDYAREHTVALYAPSKTFNLAGLIGSYHIIYNEALRDRVEARGSKSHYNEMNVLSMHALIGAYKQEGYEWVDELCQVLTENVRFACDYIAAHFKGVTVSKPQGTYMLFLDCTQWCEDHGQSMDELLQAGWNVGVGWQDGRPFHGEHHIRMNLALPKCRVTEAFERLDRYVFGMEQKSQRNTEKELLFRCRYRKIEKKIKSAVKGSQQLQSMLEKMRIGIIMLTYILLILGFILLIKGADLFVDGSSSIARLLRIPAAVIGLTIVAFGTSAPELSVSCSAALAGQNEIAISNVLGSNIFNLMVVTGACAAISAIPVNEGILKREFPFSIVAAALLLIFSLFGFGRLNIGRLEGLTLLVLFVLFVAIQVRDALKSRSENAEDPMEEVLSPLKSIVFVVIGCIMIIYGGNFVVDSASEIAANFGLSETLIGLTVVAFGTSLPELVTSIVASRKGENDLAIGNVVGSNIFNILMILGISTSIHPVALQPSAVYDCIILMIFSILVLFFCWSKKRLARGEGIFMIILYAIYTVYIIMRMNAISKEAAEYPRPLFVFHRYHDRTASACSCRLVCCLMSYEKIFDLVTKVDDFVWGPAMLVLLVGTGIFLTIRVGFLTWKNLGYAIKSTLSKEARTQKRGDGDVSPFSALTTALAATIGTGNIVGVATAMVSGGPGALVWMWISACFGLTSKFSECMLAIKYRERNEKGEMSGGPMYTMKKALPKGFGAVLGWLFALFAVLASFGIGNMTQANSISSALNETVGFSKVAIGVVLTILSLAVIVGGIKSISKVSSVVVPLMAVFYIIAGIIVIIGNIQNIPAGLVMIFKYAFTPQAVTGGVLGNVVASMMAAMQYGIARGCFSNEAGMGSAAITAAAATTDHPVRQAYINMTGTFWDTIVVCSITGLCIASSGMLGQIDPATGSLYTGSALTIAAFKTVLGPLGGWLVTIGIALFAFSTILGWEYHGEKAFEYLLNTHKLNIIYRLVFSCVVFFGATMQLDLVWKLSDIANALMAIPNLICMLLLSGEIARDIREFQKILDKERGRMSENTNTTKRRSAIQIMGSLIGLVKPLLHIMLAAIILGTLGYLCAIFLTILAGQVIVHGLLTGVAGMIVPVDNMWLVLTPVKTIITVMIVMAVLRGILHYVEQYCNHFIAFKLLAIIRHKVFAALRKLCPAKLEGRDKGNLISIITTDIELLEVFYAHTISPIAIATLTSIIMVIFIGRYHWLAGVLALAAYLIVGVAIPMWNGKRGSQKGMEFRTNFGELNSFVLDSLRGLDETIQYGQGEKRKEQMSERSKNLAGMQESLSKMEGSQRSFTNMVILLASFGMLALTIWLYAKGXXXXGFEGILTCTIAMMGSFGPVVALSSLSNNLNQTLASGERVLSLLEETPLVEEIPGDVETSGAESMEYEFTGAEAENVTFAYGEEVILDNYSLKLQPGKITGIHGASGSGKSTLLKLLMRFWDVQDGSVSVDGTDVRKIPTKHLRDMESYVTQETHLFHDSIANNIAIAKPGASREEIMEAAKKASIHDFIMTLSKGYDTEVGELGDTLSGGEKQRIGIARAFLHECPLILLDEPTSNLDSLNEGIILKSLKESTKKKTVVLVSHRVSTMNVADVVYEMKNGRISMIKTRLVGLLSHAKKYIVYTILWQWAALLSQVLAVFSIADLLEQVVYRAVTVPIIERTILILVLVVVIRFICERMGARSSYMACVDVKRILREKIYEKMLKLGASYSEQVSSSEVVQVSTEGVEQLETYFGKYFPQLFYSLIAPLTLFIILCRVSLKASVILLICVPLIPISIVVVQKIAKKLLNKYWSIYTGLGDSFLENLQGLTTLKIYQADQQKADEMDVESQNFRRITMKVLTMQLNSTSVMDIVAYGGAAIGMAVAVSEFLKGNISVAGTLCIVLLASEFFLPLRLLGSFFHIAMNGMAASDKIFKILDLPEPQAGEKTLPEVALDVTLKDVHFSYEEDREILKGINLNLPAGSFVSLVGESGCGKSTIAGILTAKNRGYNGEIIIGGVPLNEVNEINLMQRVVLVRHNSYLFKGTVEENLKMAKPDATKEEMEAVLQKVNLLGFLQTQDGLQTQLLEKASNLSGGQCQRLVIARALLRTDSAVYIFDEAASNIDVESEELIMNVIHELAKTKTVLLISHRLANVVKSDKIYFLKDGEIKESGKHDELMSQNGAYRHLYESQMALENYGKGGMAMEKVEKKRQKEQYVVEEMIRLYCRKKHPKEKRQEGQMCPDCQKLSDYAKQRSQKCPFMEEKTFCANCKVHCYKPEMREQIRQVMRFSGPRMLLYHPVLAIWHLVCSNKEKKKMRNPLRLVWIVLGFLCLGLGTIGIVLPILPTVPFYMATLFCFAKSSEKLHNWFIGTNLYKKHLDSFVQKRAMTIGTKCKIIGMVTVVMAIGFICMKNVPIGRICIAVVWVCHLLYFFLRVKTEKPEAEMAESVEMMQGDSDEDERMIQWALEVTNLTEYRDREVSRLSGGQRQRVWIAMALCQGTKTLFLDEPTTYLDIRYQIEILQLVRKLNREFGITIIMVLHDINQAIAYSDNVIGMKDGKVLVEGKPEDVITEESIRELYGIELGVTMVDGRKFVLAVMEKGEHLKRQNRPTMLQLQYLQGLSKVEKKRGAQGSIAEYYGVNRSTVNRYFKNCIERGILTESLEFTPVGEEWLERYTKLYENLEKYLEEIGAKPEEIDESLDVMVENIDIHMLELMINAYAEKKSVYKKKENELDQEIQHNLQKCERHPVVFRLYRMNKKQGQGRDSMAMRGFEEIAEIVQENGESYLELKLKEMEAHSRVSGEMMAGKLKTLKYEHNEVLEEADIEDNIVKIPMEACRIHRWTGIGTVGIVPVTVTCSAGPVHMPESTALLYFWVMVKKIENRNIDVTKARGELEEDLLEYVYRTWRQGRQITSKEYAREVNITGYEAAGLVRSLVKKGFLCEPENGHLELTDKGKLEGMECLARHEKLTQFFQMVSGMDQQRAQEDACRVEHYISPEGLKGIENFLQYGDVYDRVYDDMDLYTFYEDGDFPMAFGLYEPERRNPRFLAPEYGKLEHSVILRMKKSQNCFLLKRKKDESIGYVWYRRDDGWIQAKEEKGVYQLPTDIFTYTANTGIPVTEAVAIIAITRFEQKPLPIDYRELNIHVWMKKRNKNIFLDIFIWNYNVVGENALTNLKKGQYNLKYMVMIKDSDVDRGVKPQTSNKILTLSTCTGNGYSKRLAIHAVCIDAQTTDESKLKETGNMPARNMLDMSNPIFEKYAQDYKLHIISPQQIADDELEKFPSSLREVIGCIKYSNDKNKLAEFIYDNPRMNMEVEAARVIETITSVTIEKEEVDSMGNVNMCKAIQEMMQDSRDEGRLAGLTEGRLQLLITLIQSGKVTVKEAATLMDMTQEEFLAKSKTISMNTKVNLAGVELKNPVMVASGTFGSGAEYSEFVDLNRLGAVVTKGVASVPWPGNPAPRIAETASGMLNAIGLQNPGIDLFSKRDLPFLEKYDTKVIVNVCGHSTEEYLDVVERLADEPRVDMLEINISCPNVKEGGIAFGQDPKAVEAITKAVKAKAKQPIIMKLSPNVTDITVMAKAAEAGGADCLSLINTLTGMKIDIERQTFAIANKTGGLSGPAVKPVAVRMVYQVANAVKIPIIGMGGICTAEDAMEFILAGATAVSIGTANFANPYTTVEVIDGIEAYMRRHGVEDINELIGLVKMSVSKIKATVFSQEQLASDVFSMWLEVGSIASEAKPGQFISVYSNDDSKLLPRPISICEIDRENGRLRIVYRVVGYGTKEFSGCKAGDTLEIMGPLGNGYTLKKDKAILVAGGIGVPPMLELAKELDCEKTIVLGYRDELFLNKEFEQYGKVVIATEDGSCGTKGNVLDAIRAESVDGQVIYSCGPTPMLRALKQYAADKGIEAWISLEEKMACGIGACLACVCKSKDVDHHTNVHNKRICKDGPVFNAQEVELMIDKLVGKIKKLNAPIVVGLDPNLAFVPEHIQKKAFDEYGETLEGAAEAIWQFNKAIVDAVYDLIPAVKPQIAMYEQFGLPGLEAFHRTVEYCRQKDLVIIGDIKRGDIGSTSEAYARGHLGPVKVGSRSLYGFNEDFVTLNPYMGSDSINPFINTAKKEKKGAFILVKTSNPSSGEFQDRLIDGRPLFEYVAEKVNEWGSDYVGECGYSYVGAVVGATYPEQARITRKLMPKAYILVPGYGAQGATAKDLLPNFDENGLGAIVNSSRGIIAAYKQEKYAKFGAEHFADASRAAVIDMQKDIASVLMESNAILETVNSIIFGSHGVWFLIGAALVYFMQAGFAMCEAGFTRAKNVGNIIMKNLMDFCLGTVAFIFVGYNILCGDASKFWGGFTMNPFDFGSMDCYGFVFNLVFCATCATIVSGAMAERTKFLTYCIYSFVISLLIYPIEAHWVWGGTAWLTDLGFTDFAGSAVIHMVGGVTGFIGACFLGPRIGKYDKNGHARPILGHNISIAALGVFILWFGWYGFNGAAAADGQHLGQIFSTTTLAPACATVVAMIYTWVRFGKPDVSLSLNGSLAGLVAITAGCDNVDNVGAMIIGAVAGLLLCIFVPFIDNVLKVDDPVGACSVHGVCGCFGTLAVGLFDYTDGLFYGGGVHHLLIQLLGVVCIAGWAIVCDLILFTILKKTVGVRVSEREELEGLDATEHGLETGYAGFLMDKDNMDITEIALPTSIENTQDIKSHASVQQYRDILKSASIKTHQSVVYILLGIENQTNVHYAMPVRNMIYDALQYGRQVTEIASAHKHAHTDKISRAEYLSGFYKTDKLIPVITLVLYFNTNAWDGPLSLFDMMDSDIQKHDYAKYIQNYHLHLIEPSKISDEDLNKFDSSLREVLGCIKYAKDKNKLADFIHNNPRMNIDISAARVIGAITNTPIHFQKGDEQIDMCQAIEEMIQDGKTAGKIEGKIEGKIELISQLLRLKKITMNEASVLMHMSKEELENKIQFFSMFNPRAAVGNGSRLSCHNLPKKIAAAPFQCSVCLRNGRKQTLKVSEFQRRYIVSSKIMRKRILSLLLCCVMLIGLLPTAAFAEDSAEGPPVCSCETACTAESMNKECPVCGAENAIPQNCGQYIPVEDRTGENGSTERADDPNGPTELSAADQVQAMIDGLPNAEEIIEDNAEEVKAQLEAIDEAKEKLSDEEIDELDMTRYAEAAAALGALAAPMLLANDSPDEQFSLAPGGRYYFDLSAMNIPGTANGNLPDSTLHYVPFTYVGTVNAYKLMSEMATTEAYAQQYKYAHSLFVADYVVTNDVSWDTLNTANLIFGKDYASGGVDYTLRAPSVGSDSTGWDDSQRGMPKSNEWDTMLNKDSGYIQNWNGMFSWGQDVSSDGALLRAVRGNYSARFWGYFSSSGRNVSLGFRPVLEVPKPDTLGSDGLKVVTLDLGGGTLGGSSDAIHIIVKNGSKFTAPASNGLTRPAGDTGSYFMWLGSDGKLYAPGAIVPADVTKLTAQFALSEQFSLTPGGRYYFDLSGENVPGTANGSLPDTTLHYVPFTYAGTIEAYKLTSAMATTEEYAQQNKYAHSLFIADYNVTHTVSWDDLNTKSLIFGKDYASGGVGYTLRAPSVGSNFTGSGNSERGVPQSNEWDTMLNKNSGYIQNWNILYSWGQDTYFGGALLRAVRGLGSARCWSSNSATYSAPYVGFRPVLEVLNPDTLGSDGLKAVTLDLNGGTLGGSSDAIHIIVKTGSEFTAPASDGMTRPAGNTGSYFMWLDGNGKSYEPGDSVPADVTELTVQWTAPTYTVTLHANGGTINNGNVIEYTYGVGATLPTDVTRTGYTFKGWYYNENLTGSPVTAIGDTETGNKEYWANWEINQYTVTVKPENGEADITITQDYGTPITAPTLTREGYQFNGWDKAFPTTMPAENLTITAQWRDIAAPTGEIKIAENDWKSFLNTITFGLFFKDTQTVTVTATDNSGETVTIEYLLSEKALAESELAGMTFTAYSAPFSINPDNEYVIYAKLTDTSGNVAYINTNGIVLDGTSPVITGIEAGKTYCAAQTITVDEKYIGTVKVNGTEVILDENGQFILSPASGEQTIVVTDKAGNETRVIVTVNDGHTYEWQSENGQYWQKCKFCNHETTKKDIPTINISGSDKVCRTQDYKFSFTLPEGATDAAYGYEFIGLGDGPLTPTVENGLYSGIIKASTYPAEENSFKLIVSAKTADGFDFSAEKTVTIQNEHTGGTATCIEQATCEICGEKYGDLKPHSYSPDWSTDETNHWHECTECRAKTDEVEHTDGNKDHKCDVCEKILSECTDTNKDHKCDLCGKTLSEHSGGKATCKDKAKCEFCGESYGELNVNNHSDLKHFSAVAATKTAEGNIEYWYCSGCKKYYKDAAATQEIKQADTVTAKRPSGTITPGADKSPQTGDNSKLLLWIALLFISGGAVTATTVYGRKKKRSVKEAYSLPDTSEYIYLHTTAELKQIFGEHFPDDTESDFYEMEIGTAGLMRSYMARKCDIHFPLERKLSRFLTAAMRVYRIPEAEQENVLAFIQSLDIKAIATEVMYKLFAMLEMKYDFKLSSGSETEETKFEGYSYQHVKLPPAFSREELESLEFVPGQKNLVLYGPVGVGKTHMAIAAGVKACNLGYKTKFYTVTELVLKLAESRKNGTLEKLLRDLRSLDLLILDEWGYVPVDKDGSQLLFRVISDSYESKSLILTTNLEFSKWGGIFTDDQMAAAMIDRLVHHGHLLIFEGKSYRMEHALMRQDACLRIMNELTNQYGFQAAASAMEMACARGNINICDASVLAARITGYGISTPPETGPSLEIYDEAFLKGGNKALMMTPKMKEDLCTQILNASRQLFLSSKISEVCQEKGTQKQLEFILELMNEELTLRDKNRRKRLIKRAGFPTYKTFEGYSYQHVKLPPAFSREELESLEFVMKIINLGILAHVDAGKTTLTESLLYTSGAIAELGSVDEGTTRTDTMNLERQRGITIQTAVTSFQWEDVKVNIIDTPGHMDFLAEVYRSLSVLDGAVLLVSAKDGIQAQTRILFHALQIMKIPTIFFINKIDQEGIDLPMVYREMKAKLSSEIIVKQKVGQHPHINVTDNDDMEQWDAVIMGNDELLEKMKIINLGILAHVDAGKTTLTSPVPPVVQTQPSKLDPFKPVIQEWLDEDKKHWRKQHHTAQRIYERLVEEQGYTGSYSVVQRYLKKCRSVQTEKANLELVWDPGPAQVDFGEADFYESGKLIRKKYLTLSFPYSNDGYSQVMVQSIFEEMGGRYERQGEYILPCLTIPPEKEQSIDLFGRRHLDYLREYRKITYTNLLTSGRLNAYLADIDRQAQEHFERLIEGMKQAQGITECLKEENALEWTGRTNNIRACAREIVEKEIIFAMISTHVDKNHIHNHIIFNAASFVDHHKYISNKRSYHKICRISNRICHENGLATSMPTGEKGKSYKENMEYHRGTSWKAKLRVAVDKAIWTSINYEEFLQKMQLAGYEIRQGKHLSFRAPEQKNFTYMKSLGSYYSEENVRIRLAKNRNKVKTPKHLSREARLYINISTYVTTGNREGFERWAKLNNLKEAARTFNYLSENNLLNYEDFKQHVSDIEVSVKVADQKIAQINSELSTQKVIQKHCDSYRLCRKVIEDCKSAKNPKAYRTKHQAEYQLHDSLKKELQDLGVTKIPSSNKIQKQIENLESEQAATVREKQELQKKQKTLDIIRQNFTSLLNAPEMQVPVSGKELALMAERKRSKEIHFYVTEEERKLIRRKMIESKTKNMGAYLRKMAIDGYIVNTDTTPLKKQYEEMHKIGVNINQIAKKVNSTGDLYPEEMQELKEMVKELWRILRSSPLKMKKEEIFEYVQKQYGTIPEYLWSKLPDSAVLRHKNGKWYAVIMTVEKSKLGLEGNDLVDIMDVKCDPEMTSMIIQTYGFLPGYHMNKRHWITILLDGSFSEAKILDFLDMSYDLIDGAGRKEENVSGLQMAINNTLKDIREERNLIQADLAEAIGSCSQTIGRIERGERNPSLEIAIRLAHYLKVPVEDIFQVEDMHDFGEILAENRKKKGYSQSDLVDLLSQEGIQVTTKAISKWETNAREPALHVFLTLCQLLDIEDIYESFFGENPYNIMSGLNEEGRNKLIEFADILKASKKFSPLSAKIIPFHHPVEITWEPVSAGTGNYLEDSVKETYDVGHLAPEQTDFGVRISGDSMEPLYHTDDVAWIQKKDSLANGEIGIFYLNGNTYIKELHDEPDGVYLISLNQKYRPIQVLESDSFKIFGKVIGKCKGAEIPGFHMSERVILHSDMNCFYASVEMLHHPEFAGMPLAVGGDPEARHGIVLTANYIAKRKGVKTGMALWQAKQICPEIIFVPPRMDLYLRFSQMAREIYSEYTDKIEPYGIDEAWLDVSDSRNLKGSGMTIAREISHRIKYELGVTVSIGISWNKIYAKLGSDYKKPDAITEFNRENYKDRIWQLPASDLLYVGRQTNKKLQKLGIRTIGQLAESDEKLLESHFGKIGNVLWTFANGWDEDPVCKEGYEAPVKSIGNGTTTPRDLENDLDVWIIQIALAESVAARLRKHGFKCKTVEITVRDNGLYSFSRQIHLRQPTNITNEIVTAAFQLFKDNYKWEHPIRSLGIRAADLVLDDIPVQLDLFGNQEKKEKLEKLDRTVDEIRRRFGYFSIQRAAMYQDKVLSHLDAGTHTIHPHSYFHGMKKALTRKQKESYQCILNYMKEHGYPPTVREFGELIGVKSTSSAFSRIKQLEQNGYIRRIPASPRAIEILMNKVYVDVVAEFRKDGQLVPIFFTWEDGRKYSIDRILKIERCASRKAGGVGMMYTCMIQGQESHLFYEVDKWFMERKTAMTDRDYAIKSMKEITFQMASHAQDYLEVTIERHYTDIKELMTSYQKLILENQIVLEELDMECQEKINEDMAYVLSYLSIYNNQLNVPKMHREMNNLMIIYGLSDMIYRGMTLVKFYAPNGVMLSEILHSCFCSHYNKTDVEVQQELGIGRTSFYKMKKQALGYLGFYFYEIVVPQAKDKRFKPSLGVEEEMNNMRYEDSMKGVAAQIIKEQQRVSKIKNNPEEFHWHDEYATLNFFRFICKNIGNLGNGEIEKMVTRLKSIDQKAVENHVNGAVWAFDYDKMFCVLMENEICQKVCEKNKYNSWTKLIGNYCFQVVMDVTKAETVKTEELETRYERYKGILKDLTIMSDVFMRNVFKKRECTEYVLQVIMDKKDLKVIDQVLQKDYKNLQGRSAILDCVARDSEGKQMDVEIQQDNEGASPKRARYHSGLMDMNTLNPGQDFDDLPESYVIFITRDDALGYGLPIYHVDRKIEEVSENFKDEAHIIYVNSKKQEDTELGRLMHDLHCKNAEDMHSKILADRVYELKETQKGVEFMCREMEQIYSEGIESGELKKAKASALSMAADGMKVDKIAHYLNVSAQMVQKWIDESMSVAHMDLKAVGQRIKAAREAKNLTQEELAALVNLSTTHVSVIERGLKVTKLDTFVAIANALDVSADALLIDVVTHSVTGVTNELSDMIGKLPKDEQKRILNAVRALVDMREKTIYEKIAEKYNTTPEEVRREMQIAIDAGFDNPNPAVQEEWKKMTLKGERPTPEEVINYAVKKLKGKMKKKIIALISGAVILIIAAGSIYGKSESGHKEGEPDVVGTFSVNRDENITVVANRGHIGDKEAFARELLQMYKDDSFYSTKFSTDRGYATSLDMNIYLWKEDIEDGESVMTAEYRPVEYGKDYDVVNHPDKFQLYIDGKEVEEMYIEHPYFYEGKYYANIDGEMIEITKEVAYAMNNFYRSSKAKKVEIKNELGEVVDKMLREVPYSGQSIDGEGFMIEDFPDLNCDVEHCVLTKMEQQDIHTVINQLNSEERMIIYGIFFENKTQTQMAEIMGISRQMLSYKLKSTLNKMREMYMNKFFMICMRCDTLADPEKSVTGKPMNCWSLETRVSGLWSGVCIWAGYYSLPAYAGVTIRGIEDKMTIRRGDILWADLGMFPTTSVQGGVRPVIVVSNNKANTYSSVITVVPLTSRIYKKRYLPTHVFISKYDMTGIRKGSLALAEQVMSISTKCIIEKCGRVNKWSLDRVLKAVQIQMGMEGEGHDGRGIMTAEEYRNYLEQDFSDVDINEMTDLRMIKADRNKSLQERRDIFLNKVGNPYLVRIGNMKVKVRFANNGISMEQAFENMLLSVMYQNINKIYHAAIYVRLSKEDGDISSSAKLESNSISNQKALILDFLKDKKDIEVVSVRVDDGYSGSNFERPAFQAMLEDIRRGIVDCVVVKDLSRFGREYIDSGKYIERLFPALGVRFIAINDNYDSLKGKNQADEIIIPFKNLINDAYCRDISIKIRSNLEIKRKKGECVTPFVAFGYRKTKTDKHKLEIDPSAGSVVQDIFKMKLRGMSQDAIANRLNELGILSPFEYKISSGSHYETGFRQKEQALWSSVTVRRILENEVYIGNLVQGKRTTPNHKVKQTYVKPEDDWIRIEKNHEPLVSDRDFEIVQRLLGMDTRTSPYQKQVYLLSGIAVCADCGAPMTRKVSTVAGKKYAYYLCSANKETKRCSSHRIPEKDLEDAVLVMLKQHIQNILHLKRVLEFVGTVPFQEINMKKLQDRLEKKKQETERCKELRMMLYSDMKEGIVSKEDYVELHAAYGKRLRNAEESIRAIQKEMDSELEKADNANTWLDYFVKYQDIEELSRTVVVELIRKIRVYDKKNIEITFDFDDCYQTLLNQLPAMGVDTVVDDDNNLQVKVKEVVMARKSRKNIPTVVGSATVQTEVRRPFRAGLYARISMETEETLERGTIETQVELMKNFVADTEDISVAEVYKDSDYSGTNFDRPGFVQMMEDIKHGKINCVIVKDLSRLGRNYVETSNYIERVFPFFHVRFLAVTDDFDSFREGVDLTVPLKNIINEFYSKDLAKKSSSAKKALWKKGKFTSAWEPYGYRKSEEDHHQLIVDEEAAEHLKSIFSMYMDGRNYSDIARQLNKDGVLSPTLQRKFYKTGEKPLPESKPWNNYEVKRVLQDVHCTGDSVFGKYQQSVFQGNKQRNRPESEWVHVENTHEGIIDRELFQQVQSKIQEYTEAYKKKHQQNNGAIRNHNFYTGKIWCGGCGNRMTLSRERNGTFFYICGANTNHKSGGKQCKGHRVRKEYVDDDVLRLIQTHMKTVLDTEKMIQEMNTASKNQTQYLLLDKEVGKLRRELSRISKRKSDLYEDYSERLITEEEYIQFSRIYSNEIENIKSRLDTVLAAQVRYSQDYHIEEGWGNVIHTYMSKRKLTKEMADAFVDSIIIHGKYDYEIKLVYDDQFADLQKLKKEKEAQTRMTDHRKTAVYIRLSAEDDNVDGRAKKESDSVTSQRILLKSFVIDQLGVAESDILEYVDDGVSGTHFKRQGFQQLQDDMKSGEIGCVVVKDFSRFGRDYLEVGFYIEYIFPLLQIRFISINDSYDSAASSGMTGGMNVALQNLVYNMYSLDLSKKISSALQTRTRNGTRLPVNARYGYKKGKDGRLEVDPEAAKVVKMIFRMAAEGTSFADITRELNRQEIVTCDEQKLSRGDQVQFQRFETIKKKHWSPTTVAAIVRDEIYIGTRIWGKTRCSMHTGHKAVLNDETEWVRLENHHTAIIDRQLFEKANEMHPKKKRSVAESRTNFTLERRKKQPALLLCANCGHSLLKETEHLLKCSDARTNGDPVCRSLVIRREPLEENILGLVHQYAASMLEKEKKVSYNRQCDYKEINTAELQKQSRQLTSEKMKLYDDYKDGRMDRDLYKQRAEKISGQLDEIKRKIEDAENSKKFLEQNELSDKIKLKDFLGIQKFDTEKLREIIKVIRVHSQDEIEIEWNFDDIFSEQRMCEAGVNIKVIQDTLGHKDITTTLNIYTDVTKELKRTEFDGLDKYFNNSIAMSGFGIASEKVPTMKSLDSDKKAGKSGAGEEATANDNNGFFTDNAKIDFSNVKVEPLFEEEVDFDTFSKSDFRAVKVKECVAVPKSKKLLQFTLDDGTGTDRTILSGIHSYYEPEELVGKTLIAITNLPPRKMMGIESCGMLLSAVNNLKDSEDEELHLLMVDNHIPAGAKLYMSSMKKTKEGINLKKLLRLKNTGSIFVIAGLLIILVIASYTYILQSSYTKTALETEITRDTASADAVHKLVNRRIGKEDFDQIKDQSDEKKQLYKDISSYFNEIRTLNSTRYIYTATKNEEGKLVYVVDGLDPDADDVRHPGDYIEEEMVPYIDRAISGENVYSQDIIDTTWGPIFTACYPVRANHDGTGEIIGAFCIEMDMQSAYGMVEKTNHISIICGLVAGAVLLLICLYTYYVYQKSKAEEQKQKQLLMTAAEEANAANKAKSAFLLSISHDIRTPMNAIIGFTNIALHQNTVSDIHDSLEKVQKSSNHLLSLLNDVLDFTRIESGKVTISPEPVDITQLTDNVQAIMNGLLYTRNLKFEVHREIPKNSYVLADVVRIREVLVNLLGNAVKFTKDGGKITLDISSYPGADEKHIITRYVVRDNGIGMSEEFQKKLFDPFSQEDDANARTQYKGTGLGMAITKKYVDMMGGSIAVESKKGVGSTFTVEIPLELPEQVIQSEQKQHLHRDLTGIHVLMAEDNDLNAELAAIMLEDAGMTVTRASDGKEVVNLFKNHPRGTYDLILMDIMMPNMDGHQAAKAIRALGIERSDAVTIPIIALSANAFIDDIQESLNSGMNDHISKPINMEELIDTITKYIKHDMAKGSVRKKGKKWYYRFYVEDASGNLVQKEYAGTESKSETEKLLRQAMDDYESKKFIAKSENITVGELLDIWAEEELKTGTLSNGTVQNYLGAITNIKKHPISERKLKNVTSEHLQAFFDLLSFGGTYPDGSERKGYSKDYIRSFSAVLQQSFRFAVSPKQYITFNPMQYIKLKYQTDEVDLFSDDDMDGDIQPIPREDYERLIEFLQDYNPPAILPIQIAYYAGLRIGEACGLAWQDVNLEEQCLTIRRSIRYDGSRHKNIIGPTKRKKVRIVDFGDTLAEILRNARKEQLKNRMQYGELYHKNYYREVKDKNRVYYEFYHLDGTENVPEDYKEISFVCLRPDGSLELPSTLGIVCRKIAQKLDGFEGFHFHQLRHTYTSNLLANGAAPKDVQELLGHSDVSTTMNVYAHSTRKAKRESARLLDKVAGNDMKDKELRKLIGSRAKQRRLELNLTQPYVAEKMGVTASTILRYENGSIDNTKKMVLEGLSEALHVSIEWLRGETDEYETDITDKKELQIRDAMGDILKQLPLALSKKEDAFSKDLLLLMLKQYNLFLESFQFACKNYKGNTNEADIAKVMGFESNDEYNEIMFLREITHTVNAFNDMADIVRLYSKKPEMAEQRLENLLSEVLYEDSDSVMTERKIALSIEEAADYTGIGRNTLRKLVEWKKLPVLKVGRKVLIKTDILEKFMEANEGRDLRDKGNVKAVTRNVATMLLLICNRELLFIGKRKDEDDMAKSTKTYEERIRALEKKEQESIEATKKLIAQRKELEKRKKAEESKKRTHRLCQIGGAVESVLGCPIEEEDLPKLIGFLKRQETNGKFFSKAMQKEPLTDMEEVMAIFHFTVKIVGRSKGKSVISASAYLNGDVMKNEETGRISYYTSKKEVVYTSLMMCENAPPEWLHVPEENIKRFQQSIRYKRADDKDAALEKFKITFQKQRLWNEVLKIEKNADAQLGRSFEFSLPKEWSRQEQIDYTTEYIQKTFVDKGMCVDWSIHDKGDGNPHVHLLVTMRPFNLDHSWGSKEVKDWDFVRDTDGNIVVDESHPDWWQDKKNPDRHGIRIPVLDENGVQKVGARNRKQWKRVLTDATGWNNPKNCELWRSEWAGMCNRHLSIDNQIDHRSYERQGKLKIPTIHEGADARKIEEKYLTGQIWNGSWKVEENQMIKKQNALLQKVITTFGKVSGALSIWKEWLNDIRRKQRSNSHDGSNDYTDRGTAEYHGRNASGNTGKGREADVLSGEGRTIAAIRERIIRTASNLAGYRRTVDTSGRKDRPDTEAYRRKSAMAGIGTEIKQREPAIAETEQRITELEQQLEKGRSIDERIKKLKERRSTGRVASADRADAGRTRPERPDYQETENAARRIADLEREVKQREQSREHSSLKERLEENKRIVAERERENARCRNHDRGMSRMTEECQDKLRQAEQERDYALSHQKKVEIPVEKPVLYQKCGNCNLTAYLKAKEKYDTQREKLAGRYKTKTAMYEALMFLLIWYSVSTTLFQMIRSKIFISDCVVFFDTIATFIQTIAGWIILTGKNMAQISNGISNPVVAGIVYWLIRILICGGCLVGAGILLAFTGIKIAGLYKKYCWDMITILVTLISMAIAIYFGDWIKTVLPINLLFFLLFVQLVYVGIRWYVKGWRETRGYYMPPKAKFTKAEIIEAALNIVRADGYEALTSRALGTYLGSSARPIFTVFKNMEEVQQDMIKSAKALYKEYVNKGLTTEPPFKGVGTQYILFAVNEPKLFQLLFMTEQKQIPDLSGVLPLIDESYEQILLSIQDDYKICKAAGKKLYHHLWIYTHGIATLCATKMCRFTDEEISTMITEVCMSILKKLKEGENNDMIKARNIIKSYQNGESRFQVLKDISLDIEDNDFVVILGASGSGKSTFLNVISGLERPDSGKVFYDGKDITALSDNELTSFRKENVGFIFQQYYLLPNMSVDKNVKMGADLANNKDYKNVIRAVGLGEKLHKYPSELSGGEQQRVSIARALAKRPRVLFLDEPTGALDEQTGRQVLDYICKLQKEYGFTIVMVTHNLNIAEMANTVIKMNSGKISEIYTNEAQKTAYEIGWMLVGIKNVSKLIGISIIACCAVLVCTMFLNFYFDIRLIESEITSELSMFFYNAQVSTAKVVCLVSGGCLLLTAIVMLLFYIKHYIDTHKKELGILKALGYSNIKIAKSFWVFGISIFIGTVTGYAGAFLIMPWFYALQNEDKMLPEITINFHPSILFYFVVLPTVCFSALSVYYAWYKFKKPVLLLLKDNMQTASKTPNHRIEKSSELSFVEYLKRNTLKSKKALVFFIIFASFCFSAMTQMSFSMKDLSSEMMGVMMLVIGLVLAFTTLFLAITTVINGNTKTIAMMRVFGYSQKECCRAILGGYRPLSYIGFIIGTVYQYGLLRLMVDIVFKDVEGVPTYKFDFPTMLISLACFITIYEIMMYIYSEKIKKISIKEIMIEMRTIFAEYNPHRNSIDVYTSAGYMLRIDCWEAEKNLKTTPGSDCALNALAIDEPLEYARLYLDGTMQMWVDAEDSLEIMMTVNEVSKLTGVSIRTLQYYDTIGLLKPIEYTESGYRLYDDTSLERLQQILLFKELEFPLKEIKKIIDAPNFDRNKALEQQIELLTMKKEHLENLISFARGIKGIGVKYMDFKVFDTTKIDEYSKRAKEQWGQTSEYKEFEEKTKNWTKDDEATVANEFMQLFVEFGQMKEMDPEDEQVQLQVRKLQDYITDHFYTCSDKILCGFGRMYAGGGELTENIDDVGGVGTAEFASKAIDIFYMSRRPCRMVVPIVEEIASERRDIKVGKINVDEEPELANKFSIMSIPTLVVMKNGKIVQQVSGARPKNAILEMLMNETAKRILKTAGIILLAVILILVIYLLYLVISYHRIEDNLALQVETSDEGGQQETKNLTTGEQYSALTYNIGFGAYTPDFSFFMDGGKSSWAKSKDCVLDTVQGAGDLAASLNPDFAMIEEIDLDSTRSYHVNEYDILRNCFPNDYYVFAQNYDSAFLFYPFTQPHGSSKSGIGLFSKYPVTSALRRSLPISTSFSKFLDLDRCYSISRVPVDNGKELVIFVLHMSAYGNSDAIREGQIAMLSADMQKEYEVGNYVLCGGDFNHDLKASDGDEEEHESWAYPFPRKALPEHFSFCIDALSEEERNAMWNSARNADMAYVPDVTYTVTLDGFIVSDNIECLTYENVDTGYSYSDHDPVYMEFKLKMIKHIWAVYFSPSGKTKQVTMAVAEGAAGVLKIGEIHVYDFTLPDKREHPFCFGEEDLVIFGCPTYAGRIPNKIMPFIRDRICGHGASAAIVMTYGGRSIDHSVMEAYLLLRENGFKVYGAGSAVTRHVMSDILSAGRPGTEDLKAAGQFGADVVHKIMTQPENYNDLRLPGSNPVGPYYKPLEADGTPANFLKAKPKVHNEICTRCKICAEVCPMGSISRENVEEVTGVCIKCHACVRKCPTGARFFDDPSLISHIRMLEENFAGQPKDNNWYLMMNYCMECGTKLELRHLENEGEIPFCSQCNQFRFPIFNTAVSMICIDVKNQKILLIKQYGRPDYILVAGYISRGEDAEAAVKREVFEETGMTVDRLQFNKTSFFEPSNTLMVNFACMIEHPEDLKVNEEVDNFKWFTFDEARANIKKNSLAERFLLHYLDHLVKMAKSKNIFFCQECGYESAKWLGQCPACKAWNTFVEEPTIGKGSTASGGIRHQAKASEPVLLSSVHSSDEKRRPTGISEFDRVLGGGIVPGSLVLVGGDPGIGKSTLLLQMSRCLSEQSCRTVYVSGEESLQQIRLRADRLGVFKNDLAMLCETNLDVIQETILKYKPEVVIIDSIQTMYREAISSGAGSVSQVREATSVLMQLAKRENIAIFIVGHVTKEGVVAGPRVLEHMVDTVLYFEGDRHASYRLLRAVKNRFGSTNEIGVFEMCSEGLTEVKNPSEFMLSGRPEGTAGSVVACAMEGTRPLMLEVQALVCQTNFQIPRRTAAGTDYNRVNLLLAVLEKRLGLKLAGCDAYINLAGGMRLNEPAIDLAIVAAVISSYRNAAVESDTMIFGEVGLTGEVRAVSQAEQRVREAEKLGFKVCCIPQSNMKYIRSNTGIRVIGIRNVKDLYDFICTGRVLEMAVVEELIRVENENGLSFGDYTLNAKKKVSDFEFHGDMYKVKTYRDITKLEKNELFVYESVPGTSVFDFEETDVRTEFEVEGFEDTQITLELEAEQEYEVFVDDVNIGRMTTNLGGKLVLSVELGSAQKHVKVVRVMQYRFTQMAANVMHYSKEVAAELNHSYIGTEHILIGLLREKEGLACQVLEDHDVTEEKVLHMVSQLIQGSQTMVAEPEEYTPRSRRILEIANREAMRFRASAIGTEHLLIAILRETDCVAAQLLYSLGVQAQKVYQDIVLGIGMDARAAKADMPSAKGKSRRKNEPLMVDQYSRDLTAYAREGKLDPVIGRHDEIQRVIQILSRRTKNNPCLIGEPGVGKTAVAEGLAQKIISGNVPETIKDKRVLTLDISGMVAGSKYRGEFEERIKRVINEVKEDGNILLFIDEIHTIIGAGGAEGAIDAANILKPSLARGELQIIGATTIEEYRKHIEKDAALERRFQPVMVEEPSEEEAIEILIGLKGAYENHHHVTITDEALEAAVHLSARYINDRFLPDKAIDLIDEACSKVRLSSYTSSPKVKELEKKVAELEEEKEQAIKDEAYERASEIKKMQKELNDEMIRLNSEWEKVRSSEQLIVGENEVADIVASWTKIPVRKLEEEESERLRKLESILHERVIGQEEAVSAVSKAIRRGRVGLKDPKRPIGSFLFLGPTGVGKTELSKALAEAMFGKEDAMIRVDMSEYMEKHSVSKLIGSPPGYVGYDEGGQLSEKIRRNPYSVLLFDEIEKAHPDIFNILLQVLDDGHITDSQGRKIDFKNTVIIMTSNAGAANIVTPKKLGFAVGDTHEADYQKMKAGVMDEVKHLFKPEFLNRIDETIVFHPLTKENVKDIADIMLKTISKRIKEQLGVETVVSEAVRDHLAEKGFDENYGARPLRRVIQNEIEDAMAEEYLDGKFVQGDTVALEMDENHIKFVRKMRKWYEMEACNQGPIIGGQVYLVRNIMGYPFEAKMNEEEQKALMAAVCYAVRQSEEVLQKKFVFINFSEVRDYEQQALIGKLAIPPQMFEKGHEAGILISEDESISVLVNGKEHLCIQVSCPGNHIQEAMALAGQVDDCLNQYLKYAFSKKYGYLTSSSLYMGTGMSASYLLHLPYLEKKSVMHQIEKQISQYGFTLRPHFDGQTEAPGSVYRMRNRKTLGLSESEITSALEHLAGQLAEQEEALARQCFNEDRLSQVDPMYRAYGLIKYARKLGYDETMACLSLLHAGDLYHIWPEQAEICPFAVMLNMADAVLSASAEKNISSSERGRARADYIRRNLPVLDASEAVSSMLCDGCHENEAVVFYTEIINGEKKELHLCEACAAKETGMDHSFVSLTDTSFLANLLASVLGKRQETDDEENLKKTNLVCPSCHMTYNEFLKYGTFGCPDCYKTFNFVLDGYLKKIQGNCEHTGKEPLYGGETVHIPSITADADHAEMKDVEQDIAFTVDAGSTEEELRAALKRAVAKEEYEEAARIRDIIRAGRKEADEHAMILEIDFNSDEALYIQLRNQIVIGIATSQLSAGDSLPSVRQLADRVGINMHTVNKAYTVLRQEGYVKLDRRKGAVIAIDCNKASARNKLLRDLQVMLAGAMCKGITRDEVHEMIDMIYDYYEQPANYPEEGMSVKRELIKGTLILTAAGFAARLLGFFNRVYLANLISNAELGRYQLIFPIFMFCMAVSCAGIQVAVSKMVAAYHGTGKKKAIRQTIKSAGIMSLIVALLSSGCVIAFSEPISRWILKDISCRGYLVIMAIAIPFAAVHTCVGGYFYGIRHTAVPAVTQLLEQVVRVVTIYLLGAMMYQKGKIDASVAVWGLAAGEIFSCFLTWICYRFSIRSQNGGSGSGEPIRKILRQLWQYGGLLTANRVSVTLLQSTEMILMPVMLAKYYGDTESALSVFGIVTGIVLPVILFPNTVTNAMASLLLPAVAEAEEVHDYRAVSGAIKKSLEYCLLLGLFSGLVFGVCGNQIGSLLFNDIEAGGYIQSFAILCPLMYIQSLLAGALNGLGKMNETLLHHVIASGIRLFGVVVMMPQMGIYGYIAGVFWANAAVTVIAAVRLYQIVGRISSAKRDMRITLVTVGKIKEKFFVQAIEEYSKRLSRYCKLEIIEVADEKTPDKASEALELQIKEKEGERILKSIKDDSYVIALAIEGKMRSSEELAARIEKLGIGGESHLTFVIGGSLGLAPAVLNRADEKLSFSPMTFPHQLMRVILLEQIYRSYRIINHEPYHKMVKTFYLSNGLKVAMEYMPQYRSVSMGVWVKAGSVNENKQTNGIAHVIEHMLFKGTEKRTARELADAMTEIGGNMDAYTTKEYTCFYTKTLYEHLFYAIDILGDMLSNSKIDENDLKKELGVIAEEIDMYDDSPEDIVHERLQEVIWREHSLGYLISGDKQTVLGFKRQDVLDFMKQYYTADRMTIAISGYFEEARVLEALENCFGGIAPGYKASLLEANAQIAKAKYYPSLYMQHKDVEQVHMIIAFESLDYYDPERYILSVVNSLLGGNVNSRLFQTIREEMGLSYAIYSYGGSYEKGGLFHIYAAVHPNQVRPVLKAVVDIIQKLKKELVSDRELYIVKESVKTDLIISDESTYNRISNYGKSYIHGETIETVEEAAEKIGQVTAEEVRAFVQKHFDLSQMSLSLVGDLKTLPREEMEELWMTYRTEKAMAKVMKTMDGNTAAAWTSYAFTEVAGIFPITPSSPMAEVTDDWAANGRKNIFGQTVDVVEMESEAGASGTVHGSISSGALTTTYTASQGLLLMIPNMYKIAGELLPCVFHVSARALAYHALNIFGDHSDVMACRQTGFAMLCSNSVQEVMDLAAVAHLSTIKGRVPFLHFFDGFRTSHEIQKVECTDYDELAKLVDYDALAEFRKSALNPEHPVMRGTAQNPDVYFQGREASNKFYDALPEIVEEYMAKVSEMTGREYKLFNYYGAPDADRVIIAMGSMCEAAEEVIDYLTAKGEKVGIVKVHLYRPFRADKLFEAIPATVKKIAVMDRVKEVTGYGEPLYVDVCAAAFKEGKTYDIVGGRYGLGSKDVTPGSIISIYENLKADQPKNNFTIGIVDDVTGHSLPIIPEVDVAPAGTTSCKFWGLGSDGTVGANKNSIKIIGDHTDMYAQAYFHYDSKKSGGVTQSHLRFGKTPIRSTYLVKTADFIACHNQAYIHMYDILGDIKEGGTFLFNTVWSPEELDEKLPSKVKHQLAQKHVKFYIINAEDVDKELKLNGKTNAVLQAAFFKLANIIPIDTAVKYMKEMIVKSYGKKGEDVVNKNFAAVDAGLDKIVEVPVPESWATCPDDAPVVKDVPDFVRDVVMPMNACDGDALPVSAFNGREDGHFPLGTAAYEKRGVAVSVPVWDAAKCIQCNQCSYVCPHATIRPVLLTDEEAAAAPANFGAVPGKANLAGKYQFKMQVSPLDCLGCGSCANICPTKALEMVPLGTQLDEAPNWEYAVALPQKENPMDKYTVKGSQFEKPLLEFSGACAGCGETPYIKLVTQLFGDRMYVANATGCTSIWGGSAPSMPYTTNEKGQGPAWCNSLFEDNAEFGLGMFMGQKHRREALAKKIKGLVDLGVLAEEAQAWLDTKEEGEASKATSAALLAAAKAYAGDNAEAKAICDAIVEGYDLLVKKSQWIFGGDGWAYDIGYGGLDHVLASNEDVNVFVVDTEVYSNTGGQASKSTPVGAVAKFAASGKKTKKKDLGMMAASYGYVYVAQVAMGANMNQFIKALKEAEAYHGPSLIIAYAPCINHGIKGGMKGAQTRIKEAVECGYWSCWRFNPELKAQGKNPFILDSTKEPKGDFRAFIMNEVRYASLKKGFPETAEALYAKTEADAKDRLAGYIKKAAEMKVKICPLCDSEMKKAHYCDTCHSFIWRPEILDVHYNAQQRGMGEEDCAYGVSHDQKDHRNDIYGRFSDALKKEDKKQKNRKKATSHEEVYGSSIQKKAGRSYRTDRSGTDMEAKRRKAGGCLGKVVLAIIILNALLGAVGSRLIHYFTNGDFQYVIEDLMDELGVDDADEIIGSDTSSEEYYRELSEQEVSAYPDGCNGYGHFDVTDEDMGALIEAWTRTEYGRDISGDDSSSEDNYIYTYDGETTSYLQKTTYYNVDGEYNDYVIIYSDSATGKIHSVTASMEDTERIKSFLKMVAQKLDSKADWSEKELERQCDNFLKQMDSGDGSVDIDNMVINGSKYSDGEIWLSIDCTDFMAKEYKSFSMELAGRTLRVEVGHVAAQANGAALMYYGDTCVLSTATASEKPRDGIDFFPLSVEFEEKMYSVGKIPGGFNKREGKASENAVLTARVIDRPMRPLFPKDYRNDVTLNNLVLCVDQTCSPELTAMLGSAIATCISDIPFDGPCAMTQVGMINGEFIINPSNEQKSVSDLALTVASTREKVIMIEAGANEVPEDKMIEAIYAAHDVNQEIIKFIDQIVAECGKEKKDYEHYAIPEELNAAMKELFPPEAMEEAVFADEKQTRDANIRVIKDKLAEAFADKEEWLPLIDDAVYQYQKKTVRKMILKDHKRPDGRAIDQIRPLAAEIDLFARTHGSAMFTRGQTQICTITTLAPLSDAQKVDGLNEFVTSKRYMHHYNFPSYSVGETKPSRGPGRREIGHGALAERALVPVLPSEEEFPYAIRTVSETFESNGSTSQASICASTMSLMAAGVPIKKPVAGISCGLVTGDTDDDYLVLTDIQGLEDFFGDMDFKVAGTHDGITAIQMDIKIHGLTRPIVEEAIRRTKQAREYILTEIIEPCISEPRKEVGEFAPKIQQIKIDPSKIGDVVGQKGKVINQIIDETGVKIDITDDGAVSICGVDKVGIQKAIDMITMIVSDFEEGRIYTGKVVSIKEFGAFLEFAPGKEGMVHISKLDKKRVNHVEDVLTLGDVIKVKCMGKDKMGRISFSKKDAEMITAEQKKEIVAKYGKTPEDTGSPEVQIALLSARIADLTEHLKTHKKDHHSRRGMLKMVGQRRGLLDYLKKTDIERYRAIVEKLGLRRMKLWGGRFTKEENQLVHNFNASITFDQKFYHQDIQGSIAHVTMLAKQAIITDAERDTIISALKEICSDIESGKLQITEEYEDIHSFVESVLIERTGDTGKKLHTGRSRNDQVALDMKLYTRDEVLATDELVKELMTTLLDLMKEHIDTYMPGFTHLQKAQPVTLAHHIGAYFEMFKRDRSRLHDIHERMNYCPLGAGALAGTTYPLDREYTASLLGFTGPTLNSMDSVSDRDYLIEYLSALSTIMMHLSRFCEEIILWNSNEYRFIELDDAYSTGSSIMPQKKNPDIAELIRGKTGRVYGALTSLLTTMKGLPLAYNKDMQEDKELTFDAIDTVKGCLALFKGMIKTMHVNKETMAASSKNGFTNATDAADYLVKHGVPFRDAHGIIGQLVLICIDKGIALDDLPLEEYKKISPVFEEDVYEAISMKTCVSLRQTIGAPGHEAMQKVIDINSRYLEENMNLDIVGRIRKENEKRGWTVYRLAKEANLSPSTLTNMMHRGTCPSLTTIENVCEAYGITLAEFLYGQDDLIHLNAEPKRHLDRWNLLTEKQQRAVELFIDGLNQIGMHILVSTTTASDLAETAEQSIDYLQKIVDYMISKAHILISALIILIVGWYLTKFICKLVRHSLDKTRLDASVTSFINSLTKFGLRALLAIIVINKLGVDTTSLIALLTSASLAIGLAVQGSLANFAGGVLLLIMKPFVVGDYIDDGSGHEGTVMSIEIIYTRLLTANNEMVCIPNGKLADSPVTNLTHQENRRLDFPVSISYDENIDRVRTVLLKVAAECPTLSKFKEPFVFVDDFDSSSVRVVLRVWALTDKYWDTRFEIREAIKKAFDAEGIEIPYDHMDVNLVNSEKMLLTRPVLRQCFVLPYVPLSVAGSGSVPVMNQFVENLFIMANVKPFKAIRPSSALAAQVAALPYDVYNREEAAEKVKGHPLSFLNIDRPETQFDPSMDMYADCVYEKAKEMLDREIAEGIFVQDEQKCYYLYELTMNGRTQTGITACVSIDDYLHQVVKKHEDTRAEKEQDRIRHVDVCSAQTGPIFLTYRTNPILSYIVCHVKEESPVYDFEAEDGIRHRVWIVGDDLAVAAIEKAFAAVDALYIADGHHRAASAFKVGMKRRRTHPAYNGTEEFNYFLAVLFPEEELKIMDYNRLVKNLNGWSKEDFLERIRRDFTVEHVGKEAVSPSKKGEFGMYLDHDWYRLNVHPDKTSEDPVDGLDVSILQMNLLDPVLGIEDPRTDENIEFVGGIRGLGELEKRCHEDMVVAFSMYPTSIRELLAVADAGRLMPPKSTWFEPKLRSGLFIHQIEKMKISCLNPIAAVGMQLFTDAYEKVDDFAASDAALVRSASVHELELPDQLLAIARAGAGVNNIPLDKCAEKGIVVFNTPGANANGVKEAVLAGLFLGARDIVGGVNWVQTVKEDPNVAKLVEKGKKQFAGTEIMGKKIGVIGLGAIGVLVANACVALGMKVYGYDPFISVDAAWNLSKDIKHIANVEDIYTNCDYITVHVPLMDSTKKMINADAFAKMKDGVIVLNFARDLLVDDDALEAAIAAGKVRKYITDFPNAKTAQMNGVVAIPHLGASTEESEDNCAVMAVKELRDYLENGNITHSVNYPACDMGICKAAGRITICHKNIPNMLGQLTGACAAEGINIEDMTNKSKGDWAYTMMDIGSEVSEALVEKLAAINGVVKVRKVKMSRVYNFSAGPAVLPVEVLQEAADEMLDYRGTGMSVMEMSHRSKAFDNIIKEAEADLRKLMNIPDNYKVLFLQGGASQQFAMIPMNFMKNRKAGYILTGQWAKKAFSEAKIFGEAVELASSADKTFTYIPDCSDLPITDDMDYVYICENNTIYGTKYHTLPNTKGKLLIADQSSCFLSEPVDVTKYGMIYAGVQKNVGPAGTVIAIIREDLITDDVLPGTPTMLKYKTQADNDSLYNTPPCYGIYICGKVFKWLLKTGGLEERKKINEAKAKILYDFLDQSKMFKGTVEKESRSIMNVPFVTGDKDLDAKFVAEAKAAGFENLKGHRTVGGMRASIYNAMPTEGVVALVDFMKKFEAENTKMLLTGAEIVVECLKEQGVDTVFGYPGGAILNVYDALYKHSDEIRHVLTSHEQGASHAADGYARTTGKVGVCLATSGPGATNIVTGIATAYMDSVPVVAITCNVNVNLLGKDSFQEIDIAGITMPVTKHNFIVKDVNKLADTIRRAFAIAQTGRPGPVLVDIPKDVTGAEAEYEYKVPAPIKRKSDQINEETMQEVIGLIEHSVRPFILVGGGVIRADAADELREFVSKVQAPVADTLMGKGAFDGREDTYTGMVGMHGTKTSNYGITESDLLLAIGTRFSDRVLGNVKAFARHADLVHIDVDAAEVNKNVMCKYSIEGDAKVVLQRLNEKLTQQDHEPWMRHIREMKSRYPMTYNHEVLTGPGVVESIYKATDGDAIICTEVGQNQMWAAQFYKYKEPRQFISSGGLGTMGYGLGAALGAKLGCPDRIVINVAGDGCFRMNMNELATASRYQIPVIEVVVDNHVLGMVRQWQTLFYGERYSATVLSDSVDYVKVAEAMGVDGRRVTTQKEFDETIQWAINLKKPVLIDCMIDPDDKVWPMVAPGASIADAFSEEDLDNMKSDNVKSGMQQAPHRSLFNALGMTQEEMKKPLVGIVSSYNEIVPGHMNLDKIVNAVKLGVAMAGGTPVVFPAIAVCDGIAMGHIGMKYSLVTRDLIADSTEAMAIAHQFDALVMVPNCDKNVPGLLMAAARVNVPTVFVSGGPMLAGHVKGQKTSLSSMFEAVGSYAAGKMSEEDVLDYEQHACPTCGSCSGMYTANSMNCLTEAIGMGLQGNGTIPAVYSERIKLAKHAGMKVMELLEKNIRPRDILTEKAFMNALTVDMALGCSTNTMLHLPAIAHEAGVEINLDIANELSAKTPNLCHLAPAGHTYMEELNEAGGIYAVMNELNKKGLLYTDLITATGKTVGENIKGCENKNPEVIRPIDNPYSQTGGIAVLKGNLAVNGSVVKRSAVVPEMMVHEGPARVFDCEEDAIAAIKGGKIVPGDVVVIRYEGPKGGPGMREMLNPTSAIAGMGLGSSVALITDGRFSGASRGASIGHVSPEAALGGNIALVEEGDIIKINIPENTLNVDVSDEVLAERRAKWQPREPKVTTGYLARYAALVTDSSKGAILQAPTVMNYKIALIKGDGIGPEIVDEAVKVLDRVGVKYGHTFDYTRVLMGGESIDACGVPLTDEAIAQCKASDSVLMGSIGGNTTTSPWYKLEPSLRPEAGLLKLRKSLGLFANIRPAYLYDELKAACPIKDEIIGDQGFDMVIMRELTGGLYFGERKTVEENGVLKAYDSLTYDENEIRRIAIKGFEIAMKRRKNVISVDKANVLDSSRLWRKVVEEVAKDYPEVTYSHMLVDNCAMQLVKNPGQFDVILTENMFGDILSDEASEITGSIGMLSSASLSETSLGLYEPSHGSAPDIAGTNQANPIATILSAAMMLRYSLNLDKEADAIEAAVKAVLKKGFRTVDIMSEGCTQLGCKEMGDAIAAEIQMDTTLSLYRIFYTVAQCGSISAAARHLYISQPAISKSISNLENELQTHLFERTSRGVSLTEEGQLLFHHVSDAFHSLEAGEAELSRIRDMGLGHLTIGVSTTLCRYRLLPYLKTFIAQYPHISINISCQSTNHTLDMLRDGSIDLGLVAKPEDTGHISFVSQGRIEDVFVCTPNYLNNLQMRTQASGLDLLNAGTLMLLDKANASRQFIDYFLEENHIHASNLIEITTMDLLIEFARTGLGIACVIKDFVADDLKSGLLVEIPTPQAIHPREIVFAWKKGRSSHRFLNAFIDFVSMKTCLQEKYGLFINGQWQPASDGKTFKSYNPANGELLAECAQATDADLDLAVDSAWKAWDSWKQTTPAERAKILNRIADIIDENAEHLAMVETLDNGKPIRETMAIDIPYSAEHFRYFAGAVLAEEGTASMLDGNTMSLILREPIGVVGQIVPWNFPFLMAAWKLAPVLASGCCTVFKPSSTTSLSVLEFARLIQDVLPAGVFNVITGSGSGVGNSMLKHKGFRKLAFTGSTEVGRDVALAAAEKLIPSTLELGGKSANIFFDDCKWDMALDGLQLGILFNQGQVCCAGSRVFVQEGIYDKFVEAAVKAFNHVKVGLPWEQDTQMGSQINEGQLKKILSYIDIAKSEGATIACGGERCTEGELAKGAFMKPTLITNVTNDMRVAQEEIFGPVACVIKFKTEDEVIEMANDSKYGLGGAVWTRDINRAIRVSRAIETGRMWVNTYNAIPAGAPFGGYKQSGIGRETHKVILEHYTQMKNIMINLSEAPSGFYPEKMAKIFYEQDCNLSLLEGKTIAIIGYGSQGHAHAKNLKDSGCHVIIGLYKGSKSWAKAESEGFEVYTSAEAAKKADIIMILINDEKQAALYKDEIEPNLEAGNMLMFAHGFNIHFGTIVPPKDVDVTMIAPKAPGHTVRSEYVAGKGTPCLIAVEQDATGKAQELALAYALGIGGARAGVLETTFRIETETDLFGEQAVLCGGVCALMQAGFETLVEAGYDPRNAYFECIHEMKLIVDLIYQSGFAGMRYSISNTAEYGDYITGPKIVTEDTKKAMKQILSDIQDGTFAKDFLLDMSDAGKQVHFKAMRKKAAEHPSEKVGEEIRKLYSWNGEDKLINNMKERKKILTMLVENNYGVTSRVSGMFSRRGFNLDSFTGCDTLDPRFSRITVVVHGDEQVLEQIEKQVRKLEDVIYVTDLTAVDSVCRELMLVKVRVLSENRQSIMAVSSIFHGKVVDVTRDSMIIELTGKQEKLDAFINLLDGYEILEVASTGLTGLERGSECVVPLKGKSLMIKNIGFIGAGVMGKSMIRNLMKKGFQVTVYSRTKSKAEDIIAEGAIWRDSAAECAKGQDVIITIVGFPKDVEETYFGEKGIIANSEDNAILIDMTTSSPKLAAKIYDEAKAVGKHALDAPVSGGDSGAKAGTLSIMVGGDKEIFEKAMPVFEAMGTNIIYEGTAGCGQHTKMANQIALTGCIAGVCEAITYARKTGLDIQTMLDSISAGAAGSWQMSNMAPRMLKGDFDPGFFIKHYIKDMNIATEEGREAGADLSISEAVLAIYKDLEAKGLGDLGTQALLKHYLDVMKGLLLKDYYMLLKYCRPYALIVLIFGVCSLADGGNLFMLAYPAVLCGINSVSLLAYDEKSRWQQYCETMPYTRKQVVDSKYLLSFLLIAGLSVVLAAAHSLVGAVRGIFNPVWVLNIFCLIWSVGHAFSAICLPMIFKYGSEKGRVMYIAVVVVFCVAFVNFGGYDFSEVSQLSGAFAVFAENPIYMVVLAVIAAVLFLGSMKLSEQFYMKRELMNAIEIRDLSKSYKDFNLEHLNLTLPGGCIMGLVGENGAGKSTTIKLILNMIHRDCGSISILGRDNVTEMQSLKEDIGVVLDEVGLPECLNRRQVGNIMALTFKNWDSDYFEALCVKLGVPDQKKFGEYSKGMKMKIGIAVAMSHHPKLLILDEATSGLDPVVRDDVLDLLNDFTRDENHAVLVSSHIVSDLEKICDYIAFMHQGQLVLCEEKDRLTELYGLIRCSAEQLKELNPQAVIGKSESPYGVEAVVRRAELPAGWEVSPIDIEELFVMMVRGRAMTKLNLLYILYIYSRQGGKGVNIFIDNKSGAPIYDQIYSQIKAQIIGGDMQEDESLPSIRSLAKDLRISVITTKRAYEELEKEGFIYTVAGKGSFVAPKNVELLREENLKKIEGYIQEIRKLAMPCGLSLEDIIEMFRILEEDEMTTFFQGGTAMQMLTGNDFIDEGPFTIDDIFALPEGQRAELIDGQIYDMATPNRMHQTISFSIARTIADHIDAKNGGCEVYMAPFAVIIQNDIKNYVEPDICVICDKDKLSDRGCEGAPDWIIEIVSPSSRKTDYIIKNTAYSRAGVREYWIVDPAKACTTVYDYDKDAAPTIIPFDQSVQCGIFPDLSITVSDYLKMEENNKKRQLQRAVFVFTLVVCLSAIAGGLGSATFSNYFKEVYHVDSAQRGFLEIPRESPGVLCALIISALAGFSDIGIAAVSQVLVMVGLMVMGAFSPSYGMMMIFLFIQSLGMHLFMPLNDAISMDLAREGEVGKTLGNFKSKANMCTMVTAFVIFAGYRWGFFSFEDKILKPFVIAAILSLIAAGLLFYMKKIMPRTQIQAKTKSKFVMRKKYMPYYLTLVAYGCQKRIKLVFGPWIIIELMGKGADTVALLGIVTSFIGAFFSKYLGKMLDEKGLKYTMIFEGGYLLVVIAALGAAAGALERGGLGSHGIWVFLVYCLYILAFLLEQFNMVHAFMMRKLAIDPSEVTASLSVGLSLDHILAITVSAVLGVIWEKFGAEYVFFLTAATSLMQIGVGLYMGRQLAKQEMQRMPVFDFSAAPEDSRQPECTYTTFQSNEETATPEKPIMILDNTKRQWQHHVCGMFTNPVKRTSFEFQEEDGEFSADILKIDSRFVSLLKWLGENHINVRLSGQNRVDGYAVYKIREIGFGGGTKLSAEDGFLQFMIERLLASNAPAEEQVDEELEEMGDDMKLTSLQSITDFMNCAGRTLPDNIRLWARRNLAVARSHEVSPEERRHAQRALSIMMNIQWKNNYFEAIDPKEARRILDEELYGMERVKQRIIETIIQINRTHTLPAYGLLLVGPAGTGKSQIAYAVARILKLPWTTLDMSSINDPEQLTGSSRIYANAKPGIILEAFSMAGASNLVFIINELDKAASGKGNGNPSDVLLTLLDNLGFTDNYIECMVPTVGVYPIATANDKSQISAPLMSRFAVIDIPDYTPEEKKIIFSKFALPKVLGRMQLKPEECIVTDEALDTIVARYADTTGIRDLEQAAEHIAANALYQIEVDHKQSVTFDGPMVRKLLDMRIFCPILDVKAREILDSRGNPTVEAEVICEAGIAGRASVPSGASTGKFEALELRDRDEKDRYDGKGVNKAVANVNVDIKDIVAGHSVTEQMHLDRMMIAYDGTENKSRLGANAMLSVSMASARAGAEMSGLPLFQYLGGTYAHILPVPMMNIINGGAHTTSALDFQEFMIMPVGACCFREALRMGTEVYHVLRKLLLEDGHVTAVGDEGGFAPNLKNAEEALDYLMRAVERAGYQPGEDVTFAMDAAASELYNDETGKYIFEGEGRLKGSSVVRSADEMIAYYKKLTEKYPLRSIEDGLDEEDWEGWVHMTRELGNRVQLVGDDLFVTNSARLQRGIQMGAANAILIKVNQIGTVSEAMKAIETAKRAGYKVIVSHRSGETEDSFIADLAVGVNAGQIKTGAPCRSDRVVKYNQLLRIEDMLGASAAYGVMVNIIEIHDFSAPELDIYARWTENQLLNRKDPANAMFIAESPKVIQTALDAGYEPISCLVEKKHVEGQAAPILAQCGDIPVYTAEFDVLTQLTGFGLTRGMLCVMRRKGLPSVEDVCKNARRIAILEDVMNPTNVGAIFRSAAALGMDGILLTSASSNPLYRRAIRVSMGTVFQIPWTFMDSQMSWPEPAVGRLHEMGFKIAAMALDDNSVSIDDPQLVHEEKLAIVLGTEGDGLAANTIADCDYTVKIPMYHGVDSLNVAAASAVAFWEMRRRMTREEFQRLCRERIVFLDGATGTNLQKAGMPTGVCPEAWILEHPDTMMQLQKAYFEAGSDIVLAPTFTANRIKLDEYGLVDKIEEMNHQLVAISKAAAGDRGLVAGDMTMTGRQLAPMGDMGFEELIDIYKEQAGYLVDAGVDLFVVETMMSLNECRAALIAIREVTDLPVCVTLSFNEDGRTLFGTDACTAMVVLQSLGADAVGVNCSTGPEQMAELVREMKAYANIPIIAKPNDGMPEVIDGETVYRMTPEEFAAEARLILEAGAGIVGGCCGTTPEHIRAFKEAAKAYPVPAVSQTYKRVLASERQTLEIGLDAGFKVVGERINPTGKKKLQAALREGQMDMVMDMALAQEEKGASILDVNMGMNGIDEKAMMLKSIEIVTQAVNLPLCIDSSHVDIIEAALRVYPGRALINSISLEKEKFEHLLPIARKYGAMFILLPLSDEGLPKNIDEKIQIIHTIMDRALELGFHKEDIVVDGLVATIGANKNAAIETLDTISYCHDQLELATICGLSNISFGLPERSYVNTAFLTMAISRGLTMAIANPSQDLLMHAAFASDLLMNHPDADIRYINRMNAVKEQQSGESTAAAVVLTPGEKIFEAVMKGSQGSIINLVKEGLDAGIMPDDMIQKHLITAIQKVGVLFAEKKYYLPQLIASAETMEKAINYLEPMLIKDDEEEKATIIMATVEGDIHDIGKNLVVLMLKNYGYRVIDLGKDVSAECIIETAVKEHAAIIGLSALMTTTMMRMRDVVELAQAKHCSSKIIIGGAVTTQSFADEIGADGYSRDAAEAVHLVERLLNKMDDLQQIRDIHRAYIEAGARLIRTNTFAVNSMFFSADEIEAVLKAAWENACQAVSDSGRDVWIAADMGPIDENETKSAADVENEYIHLADCFLGLGAKIFVFETLSELRSVKKAIAYIKAECPDAFIVTQFSFNRNGYTRSGLSVRALLLEAAAMKELDAVGFNCGVGPLHLYELLKNQSFPEGKYMTVLPNAGYPTELRGRTFYSENVPYYVDMMGRIAALGFDIIGGCCGTTPEHIRGLHDLLVNDVRPPKKLMPAVYSADGKENCAEEAVEEKTDFIQKLERGEKVFVVELDPPFDVNDTKLMEGAALLRDINVDMITLADSPLARPRADSIASAIKMRYTRQMEAMPHICCRDKNMIAHRSQLLGMQMNGLRHALIVTGDPIARGDRESIKSVFNFNSIKLMKYIQTMNQEVFGSRPIYYGGALNHNNGSIDNIAARMCQKMEAGAQWFLTQPVYGQEDIDRLKELKEKSGGRIIAGIMPLVSRKNALFIKNEMPGIHVPDQVLERYEAGMSREAYEDVAEAISVDLMKRLEDVCDGYYMMTPFNRAALIKRIILQAKKELRMVQNLKPVVELNSEDWTELLKKYKLQTVMSSVHVQMVWYRMQRALEPEIWYEVHGKEVLAAATLGEGIDQLLEKWSDKGQILDSYAADCLAMEALQCLYGLLEDELVKKNVYIEKYQFPDPDEGGDGSMADILKQIQCSEAIRLTRDGALRPMKSVVFIGILTTDKDKRCSTICRDCGREDCPNRYSLHMGNYREPGGLRYSYGYQRIFGKMMSKAYASMSREELLSLKEELDKEFQGYKEKGLKLDMSRGKPSIAQLNLSMGMMDVFHSESDLKCEDGTDCRNYGVLDGIPEAKRLLASIAEVNPNNIMIFGNSSLNVMYDTVARAYMFGLLGHTPWCKLDKVKFLCPAPGYDRHFKITETFGFDLITIPMHEDGPDMDMVEEYVNNDPAVKGIWCVPKYSNPQGYSYSDEVVRRFAALTPAAEDFRIFWDNAYSVHHLYEDKRDEILEILEECAKAGHPDMVFKFTSTSKISFPGSGVAAIATSDANMADIRKYMVVQTIGHDKLNQLRHVRFFRDRYGVEAQMRRHADILRPKFEMVEQTLEDELGGLEIGTWTKPLGGYFISFDALEGCAKAIVAKAKEAGVVMTGAGATFPYGKDPKDSNIRIAPSYPTVEELAVAAKLFALCVKLVSVEKILESKMRKEIVELEQLLEIQRLQNMAWWETSDQYQEELEASEEVREEYEEMLKELSPELCAILDRIEEAWYLMKEAELQATYMQGISDGIDMQKEKLRRVCMTTVEAINACIPLNNPELTGQLGSLSEIVHYKKGDCIYDIGDIQKKVYVLIEGMLRCYFIDESQTEMTDSFMTEKGMVANSVEIFVGKETPSVVGVEVLNETTVLEIPVQAVFDLMQQYPRMAKLYVRCLHQALEFQNEINIKRLYLPGNKRYEWFCKKWPEVDQIASNQQIASFLGIRSESLSRLRHQKRKHQMVSEKLIRQLFRTQDQAVIRRLSEISETVIYKKRQEIHKAGETYTHFYMLLRGAVYTYFYDEHQHPVVLCFFSEKNDFMNVENFNKQSTVGMTALTETEVFRVPIKEILQLSDEIPTLIWVYAGYLQKTMMYLCVINNRRMNLTAEERYQWFCEKWPEVEASASNKQIASFLRMRPKSLSRLKAQMKQSEKEAKTLENILVTKDLQWDYMDIKEMIEKRQNGQGMKQVKIIKKKDDYTMEYEVGDICKVTGTWYGGVHIEGKTGIPVSIDREEYIELDAQGKTEQVAAENVRMDEQNGHSESMGDEAAAEDVLERDIEVGDIVRHFKREWVSEESAEYLYKVLAFAQHTETGEKLVIYEALYPPYKTCARPYGMFMSEVDRTKYPDVQQKYRFEKVETKRWVMSAMNTFTGRIFDPLKMMKQDVCVEDIAHALSLVCRGGGHIRYFFSVAQHSMNCASEAAARGWSGRIVLACLLHDASEAYIADIIRPVKPYLMNYLDIEAQIMDVIYDYFELADLTPEEKKFCKQIDDEMMEHELRIMMPGEERRQTPILMSEPDFRERHYRDVEEEFKGMVEKYTENLKKPDMGDKCGGLVNAKAISENNRAKYEEAAVRKGYRQLTKLLIEKKMTITTMESATSGQIASLITDTEGSSAVFKGAFVTYCNEAKVMQGVPADILDRYTVYSKETAEAMAAACAKTYQADIGIGVTGTMGNIDPANPDVSVPGQVYFAIVINGDMKSYYIELAVQPTRLTYKLAVAKEILDVLMSRVNQVSGMRTAIEDIIKERACIEHEEGKLQILTNLIKDSILTIQGAAKRMNMTEEVFRSKMRMYEEVQVLTHSSIRIAGNQIIYFDPFHVEEEIHDADIICVTHEHFDHYSPEDLAKVKNAATILVCPKSMKDSLSNSGISEEFTELVAPGDELEINGVRIQAVPAYNIGKQFHPQQNQWVGYLVTMNEVTYYIAGDTDINEDVKKIQCDVAMIPVGGTYTMTAEEAAELAEMIHPKAAVPTHYGSVAGKAEDGQIFADILKDKINVILKMMKSRSFYNEILTEHNLRPEYKHDLPDANIVLEGVNPNCGDDIFLKLKVENDVIEDGAFVGDGCAISQASADIMLGMILGKTKEEALKLGDMFLRMIQGEATDEEIDQLEEASALKDIAHMPARVKCAVLGWHTLDEAFKKAKENSASMTASDYRKDFPLLQNEDTIYIDNAATAQRPQAVLDAVKVFYETENANPLRGFYPLSLKATESCENARATVRDFIHATSKKEIIFTRNTTEGLNLVAYSYGLSHLKAGDEIAVTIMEHHSNLLPWQMVARQTGAELKFMECETDGTLTDETIQTVINEKTKLVAVAQVSNVLGCVNPIEKIVARAHEVGAVVVMDGAQSVPHMPVDVQKLDVDFMAFSGHKLMGPMGIGVLYGRKVLLEEMPPFLTGGEMIDSVTREGAVFAELPYKFEAGTVNAAGAAGLAAAIDYLNQVSFDFIQEQELALTQRAMEGLAKVPHVHVMGSEDPANHTGIVSFTVEGVHPHDVSEILASDGIDVRAGHHCAQPLLTYLGVHSSTRASFMFYNTLDEVDAFVKSVASIRRRMGYEEMKENETLKINPLPSKTWYWLHLNDTTVKWNGDVQPCMVMAEEPEQVSEAGLNIKEMTTGVGAEADAIFEDENLPILQFTAKSEASDRVIRLDISSEDKENAAGTVYIAAEENARVTVIEKFTSGKKAQSDLAFRTKLYAGKNSTIRLIQINMLDEGQRLLNAVGSVCDETAKLDVLQMFVGRGDVYNGIQTELEGNQSELHTEIGYICQKQQTLDMNLVINHWGKKTNCDIQVDGTLKDAAKKVFRGSIDFKRGSSGSKGAETENVLLLGDDVENKTIPLILCAEEDVDGSHGATIGELDEETLFYFAARGIDQETAEDIMTKAKLEVLYQHIQDEETERIVADQLTKVMSNDSQMKEKSQVEDIDRSIYDFKDDEKDAYRIKAGLTPEIVQKLSKEKHDPAWMELFRLHSLQIYNEMAVPDWGPSIEGLNMDQIVTYVRPNTKMKAKWSDVPEDIKNTFERLGIPEAERKSLAGVGAQYDSELVYHNVREEVAAQGVVYTDMESALTGEYADMVKKHFMKLVKPTDHKFAALHGAVWSGGSFVYVPKGVSVEIPLQSYFRLNAPGAGQFEHTLIIVDEGADLHFIEGCSAPKYNVANLHAGCVELFVGKNARLRYSTIENWSKNMYNLNTKRALVEEGGTIEWVSGSFGSHVSYLYPMSILKGRDSKMEFTGITFAGKGQNLDTGAKVVHIGENTSSYINTKSISKDGGISTFRSSVVVNKGAESAKSAVSCQSLMLDSESRSDTIPAMDIRTKNANVGHEAQIGSISDEAVFYLMSRGMSEEDARACIVSGFADNVSKELPLEYALEMNNLIRLEMKGSIGMLNKQLLNVKDLYVDVEDKEILHGVDLSIGEGETHVLMGPNGTGKSTLGYALMGNPRYTVKSGEIWFKGKNITAEPVNERAKDGIFLSFQNPLEIPGVTLSSFIRNALEQKTGKRIKLWDFKKDLEKTMAILQMDPSYAERDLNVGFSGGEKKKAEILQLLMLKPSLAILDETDSGLDVDAVRTVSAGIEEYQKTCKGSLIVITHSTKILEALHVDYTHVMVEGRIIKTGDASLVEEINENGFGSYETQEQMISSKGRYALRVMTYLAVNADREFVPLKEIAEAESISLKYLESIARMLSKEHYIEGTSGRGGGYHLTRKPEAYKVGDILRLTEGTLAPVSCLKDNAEPCGRAELCCTLPVWQGLSNVITDYLDNMTLADVAGKGRFDEMKEVFETKLLFKQRLFSWFDSYDIYDETEQTVYVVKGQLAWGHCLKIFSVYGEEVGTVKEKVLTLLPKFEVYEKERYIGCIQKELTFLKPKYDIDFNGWHIEGGYMEWDYTIVGSGGQRIAAISKELFHMTDTYVMDIVNPEDALYVLMFVLAIDAEKCSRNMTNHSILTIIDKGMSVELSEGEEEMKWMIASDIHGSAAYLEKLLEAYKQEKADRMLLLGDLLYHGPRNDLPEGYQPKRVIELLNGMKDDILCVRGNCEAEVDQMVLEFPVMAEYAILTAGTRMIFATHGHVFNEKNLPPLHKGDILLHGHTHVPKCVAHENYIYMNPGSVSIPKENSYHGYMTWEGSDFIWKDLEGGVRNEVIVMEEIEFSKEVIQRGADMLEWSLEELIQQTMDALKNFRPMALFESYERRIDQINSVLNSYGIASIEEAEKITKDAGLDVYEQVKKIQPICFENACWAYTVGAAIAIKKGCRKASDAAAAIGEGLQAFCIPGSVADHRKVGLGHGNLGKMLLEEETECFCFLAGHESFAAAEGAIGIAEKANKVRQKPLRVILNGLGKDAAQIISRINGFTFVETQFDYKANKLNVVYEKPYSTGLRASVKCYGADDVQEGVAIMHHENVGVSITGNSTNPTRFQHPVAGTYKKECIEQGKKYFSVASGGGTGRTLHPDNMAAGPASYGMTDTMGRMHSDAQFAGSSSVPAHVEMMGLIGMGNNPMVGATVAVAVSVEEAARAGKFMIYSHEVELMCPVAKGAKHEPAPIPEEGKWVHSKEIKDISGFTHGIGWCAPQQGACKLTLNVKEGIIEEALIETIGCSGMTHSAAMAAEILQGKTILEALNTDLVCDAINTAMRELFLQIVYGRTQSAFSDDGLAVGAGLEDLGKGLRSQVGTMYGTKAKGVRYLEMAEGYVTGLALDENDEVIGYQFVSLGKMTDFIKNGDDPNTAWEKAKGQYGRVADAVKIIDPRKEMQEQSCFCHKIIKDAKNKKMSKKHWTSLRIDGKIVNRYDVNFAMRRKITEAHLLLIITFAMYMGYQWLMQWIPLHDVMFHVIMGQVMLIFPGALWMLIRYRKNRPQLSERMLFTPISNANIKMAVAVIISAYPVVVILNRFSMFFVKNQVMEVMPYMMRMGYFPMLFVMAVMPAFNEEFLCRGILYGAYRQRAKTTGIWLSALAFGLFHLNFNQMLYAVYLGIVLALMLEATGSIYTSMLMHFLLNGFNVTMNFMANQRLIADASVNQQQVTESVSQTLSDVPIQQLVTMAVVLTIFIFLNGILIYSTFRMNGRSLQNDGEKGRVIDGWIVIFVIITVILTYMNTDFLMYEGLKIANMYTLSETIAAELLSSVTYPWEALPKIGDFIKKLGPTLPEEDYEYRGEDVWVAKDATVFPSAYIHGPAIIGKGAEVRHCAFIRGNAIVGEGAVVGNSTELKNVILFNKVQVPHYNYVGDSILGFKAHMGAGSITSNVKSDKKLVVVHTGEGNIETGLKKFGAMLGDCVEVGCNSVLNPGTVLGPNVNVYPTSSVRGYVPAAHIFKTQDQIVKKEAMQSKSLYIAEKPSVAKEFAKVLNVGGRASDGYLESADAVVTWCVGHLVTMSYPEVYDPKLKKWSLDTLPFLPEEFKYELIDDVKKQFRIVERLLNREDVTCIYVCTDSGREGEYIYRLVDQMAHVGEKDKRRVWIDSQTEEEILRGIREAKPLSEYDHLADAAYLRAKEDYLMGINFSRLLTLKYGQSMSNYLGTKYTVISVGRVMTCVLGMVVRREREIRHFVKTPFYRVLAVADILGREVEAEWRVTEESVAWQKPVLYKENGFKTKEDAQKLITYIERVQPMEAEVTAIERKTEKKNPPLLYNLAELQNDCSRMFKISPDETLKIVQELYEKKLVTYPRTDARVLSTAVAKEIDRNISGLKQVPAFAAFADKVLAMGSYKKIASTRYTNDKQITDHYAIIPTGQGLGALRSLHPQSESVYEAICRRFLSIFYPPAQYRKLSMTLKVRTESFYASFKVLTDEGYLKVAGIPKKAQNTQGQKDDETEDVGCDTAFLDMLKDLKKGSHLPVKRLMIKEGETSPPKRYNSGSLILAMENAGQLIEDEELRAQIKGSGIGTSATRAEILKKLVTIRYLALNKKTQIVTPTQLGEMVYEVVDNSIRSLLNPELTASWEKGLTYVAEGSITSDVYMEKLERFISDRTGRVMVLHNQYQLRGNYDRCAAFYKKEQRPSAKGKTIKKVSSNAKKQTGKVSTEMTPKQQYYKNIADTMISNLKKRGFEADYVPDRQAALRAIAPYLTKGNTVSCGGSITLTEIGFNTAVKEADCIFLDRTIAKTQEEKDAVYSKVAVCDYYFMSTNAITTDGLLVNIDGTGNRVASLIHGPKNVIIIAGMNKVCPDLDSAYKRVKLSAAPPNTVRLNRKTPCAVTGQCADCLSPDCICTHTVITRRSNIPGRIKILLVGEELGYMQHQLLFFDIDGTLLSNATHQIPESALSAIAAAQKNGHLVFINTGRTIRTMPSFLKTLGFDGYLCGCGTRIVYHDEILLAHSFTEEEGQLLIDLMDKWHIEAFLEGSEDVYCKRGTYRQRIMNQVRKSFNDEGLGLSCFIEDRNFIYDKFVLVSDNQADSDAFIHEIESFIDVIDRGKGMYECVPKGFSKASAMHLLAEHLDISMDNTWAFGDSSNDLPMFEAAAHGIAMGEHSPVLEPFSEMITDTVDNHGIAKALLHFGLIMYTFDEIQAVDSEIAEAIQLEKGRQNQNIELIASENFVSKAVMAAMGSPLTNKYAEGYPGKRYYGGCQYVDIVENLAIERAKKLFGAAYVNVQPHSGAQANMAVFQAFLKPGDTFMGMALDQGGHLSHGSSANFSGKYFHCVPYGVNEQGFIDYDEVERIALECQPKLIVAGASAYCRTIDFKRFREIADKVNAILMVDIAHIAGLVATGLHPSPIPYAHVVTTTTHKTLRGPRGGMILCGTEEYAKKLNSAIFPGTQGGPLMHVIAAKAVALKEALSDDFKDYQKQILVNAQALAAGLMKRGITIVSGGTDNHLMLVDLQNLGLTGKQAEKMLDEVHITCNKNTIPNDPQSPFVTSGLRLGTPAATTRGFDADDMDQIAEAITLTLKDFEGNKEKATAIVKSLTDKHPLYEMAESMSGMKRTHRCAELSKAQVGQTVTVMGWVQKSRNKGGVVFVDLRDRSGILQIIFEENKCGTEIFEKAGKLRSEFVIAVTGQVCERAGAVNKNLATGEIEVIAEQLRILSESETPPFHIEENSKTKEELRLKYRYLDLRRPDIQKNIMMRSRACAVIRNFLTEEGFLEIETPMLTKSTPEGARDYLVPSRVHPGSFYALPQSPQLFKQLLMVSGYDRYFQLARCFRDEDLRADRQPEFTQVDMELSFVDVDDVIDVNERLLARLFKEIIGVDVPLPIQRMTWQEAMDRFGSDKPDTRFGMELNDVTDVVRDCEFAVFKNAIADGGSVRGINAKGQGTMPRKKIDALVAFVKDYGAKGLAYIAIQPDGSIKSSFAKFMKDEEMQALIAAMQGEPGDLLLFAADKNKIVYASLGALRLELADKMGLLDKNQYNFLWVTEFPLLEWSDEENRFQAMHHPFTMPMEEDLQYIDTDPGRVRAKAYDIVLNGTEIGGGSVRIHQDDIQEKMFEALGFTKERAHEQFGFLLDAFKYGVPPHAGLAYGLDRLIMLMAKVDSIRDVIAFPKVKDASCLLTNAPDTVDEKQLEELGIRVNEAEQTEEMKFIKTPVKGMCDMLPADMRLREHILQMIKTSYASYGFMQIETPVMEHIENLTSKQGGDNEKLIFKVMKRGADLTRAIEAGKQEFADNGLRYDLTVPLARYYANNKEKLPTPFKALQIGNVWRADNPQKGRFRQFTQCDIDILGDDTNLAEIELIAATSDMLSQIFSEVGITDFTIHINDRQILRAAALQAGFEEEAIGSVLISLDKYDKIGLEGIRRELIENGYAEDVVTRYLAIYESLQGDVTCGDFCSDIAENYLDRKVVEGVDDIISCAKAMINEHVKITFDPTLVRGMGYYTGTIFEISIDGYNFSIAGGGRYDKMIGKFCGQDVSACGFSIGFERIITILKDKLETVTPVSEKNLAILIGKNVPLDRKLEIFKRAKALRAEGTTVTIQPMRKNMKQQIEKLEAEGFKEFEKVYNDMHQSILTYGEFVTYIRENVEAVLNEDREAEVVLTEVEKNNGVMSEIMTIRQERENFAPVFYMRDIYEQYLRGISPDDLAEQMVSICRQQEADSLSVNGAWFEHFENVREHIILKAVNYERNSRQLTDCPFIKALDLAVTFRVLVEEEQSRIGTVLVSNEMMKWWHVSETDLYKTAAANMQRLWKDVLEPIQDMVHEMAEGPMAEAYDAFLEERPETGTMPLYVLTNEIRLNGASVLFYTDCLKRFASDIGRDFFVLPSSIHEVLLLPVMDEMSDWDLRQIVGTMNHQVVSDEEVLSDHVYRYLHKCNKLIIAAMSDYIVHASGAGNQVRIFAASTRDLVEKAREIHNTSPVATAALGRLLTAGAMMGSMMKGEKDLLTLQIQCSGPIGGLTVTAKSDGTVKGYVNNPDVMLPPNSKGKLDVGGALDLGVLSVIKDMGMKEPYVGQTQLVSGEIAEDLTYYYATSEQINSSVALGVLMEKNNTVKQAGGFILQLMPFTEDAVIDKLEENVKKLPSVTTMLEEGETPEGMIRRVLDGFDVEFYEETPTGYVCDCSKERVERAIISIGKKEIQDMIDDQKPIEVNCHFCGRHYEFSVDDLKHLLKKAVRAMEAYTGFAQVYDTFMDNVPYDEWGEYLVSLLKKYGVEEGLVLDMGCGTGAMTRYLDAHGYDMTGIDVSEEMLTIAKEKSSPDILYLLQDMREFELYGTMRAAVSICDSMNYILEEDDLLQVFSLVNNYLDPGGIFIFDLNTVYKYQEILGEQTIAEDREECSFIWDNFYDEEEMINEYDLTVFVQEEGDLFRRYCETHYQRAYSLETVRALIEKAGMEVLAIYDAFTYNKPKPDSERVYFVAREHGKKTVMERDILNRKITKKNGEKVPIRTLKLQEQLKYEIADELGLFEKIEKSGWGALTASESGRIGGMIRKRNTQNKKKEMSIQWSEKQQAVIDARGCSVLVSAAAGSGKTAVLVERLIRLLTDEKHPVDIERLLVVTFTNAAAAEMRERIGRGLDQKLLEEPDHTAWIRQKLLLPCAQISTIHSLCLKTIREHFEVLDLDPSFRLGDEAELKLLKSDVAEDVMETYYASENRAFRAFVDRYANGKTDQGIAEMIIALYDYSRGFPWPEYWLKHCLAAYSTDEEHNGADQVKEFAMMQLNNVLTKYLPLFEEARAFCLEPNGVEAYLPVIEDDKKWFQMLGESEDYDGSREILHKIVWKRLPRTAASVDPKIKEKVKEIHADFKSEIEGLRDGYFVHTFEELKAELTYIRPSVRMLIELTEVFGQQFMAVKNDRNMLDFSDLEHYMLQLLADFSEDEQGQMQVKPTSAADELSEFYEEVVCDEYQDSNQVQELILSLLSRERKGQYNRFMVGDVKQSIYRFRLADAAIFMEKYHHYALGESQKTRQCIDLSQNFRSRESVLSGVNYIFRKIMKKSLGGIDYDDQAALYPGMAFPEAKGKNIADNTELLFLKGDGETTDPDDESLDSVELEAKLAAVRIREMTDPEHGMDIYDGALGDYRKAGYKDIVILLRTVTGWAEKFVDVLASENIPSTAEMSAGFFDTLEIRTMLQFLAIVDNPGQDIPLAAVLCSPIAGISSEEMALIRSKHSEGSLFGACMACSEETPGAAKLKKFLAMFHDIRRASVYLELHELIRYIYDRTGYYDYVQALPGGERRKANLDLLRERAVAYAAGSYSSLFDFMRYIEQLKKNQIDFGEAVMPENDKGRVRIMSIHKSKGLEYPIVILAGLGKKFNFQDSISKLVMHAKSGIGLDAVNLQTRKKMTSAYKKFIAARLNLETLAEEQRILYVAMTRAKEKLIMTGMESLKNTDKKLEIWQRNSGILGEVFPDWMLTSARSYLDWIMPAVMNGEAENVVTLRMVDIRALAGREVGRVIDKKWQKEELLQRKHTLSDVSETDVSKRLFGEEGWQYPQKALLSVKGKYSVSELKKYAMEAIMEAEPAPGMALSEKQSEIEEALPDFMKDKEVDETHEVSNVGAFRGTAYHRALELIDFAGRPDERDEAWLRSQLNAMTSAGRLSGEQRQSIRIRDIADMVFSNLGFRMAEADRRHELYREAQFVMGVPVSALYPEVDSEETVLIQGIIDAYFEENGELILLDYKTDHVSKQDGADILKKRYKRQLDDYQQALEQMLQKKVRQKLIYSFALKCWIEIMSLQLILGGSGTGKSTRLYQMIVERSVQFPDEKTLLIVPEQKTMQAQKNIVMHHPRHGVMNVDVLSFERLAYRIFEELGLNQKEILEDTGKSMIIRRILTEHEEELSAFRGNIRKKGFVDEVKSMLSELLQYGVTPDILRKRSMEMGTESVLYAKLQDITVIYEAFLDRIHEKYMTTEEVPDRLCDVIEQSDMIRRVHVFLDDFTGFTPIQYRLMNRILQLAPRVVMTLNVDVSENPYQTVSMEHLFYLPKDTIFQLERICREHQVSREADIHLEGNENGRFAEHPELAAMEKNLFRKRAAARAEKPEDLMAFRLTSPNDEMGFVAMKIHEYAARKHYRYRDMAVVASDMNLYRSSADYWFDKYQIPCFFDGRRNISGNMLVEWLRSLCSVFLQKYSYASMLRYLRSGLTGISEEETDCLEDYVLALGIRGHSKWTKVWTAKMQGMTDEELDRINGIRERLILPLEALYEVSRNKESRTVDFMRRLYLYMQQLGIRGQLEAWTAFFEKNGDLSRAKEYEQIYDVMIELLERMYLILGQEPLSIQVFSDVLDAGVNDVRIGIIPPGVDQITFGDIRRTRLENIKVLFFVGMNDGLVPLMENGGGLLTEIERDRLALHHIHLAPTAKENTCTEQYYLYMNMTKPSEKLILTCSEQDAAGKEKRPSSIFDRIKAVFPKLVLERVHQTDTEKGDLIHSYQYMIRGLREISENGQIPEDWLDVYDWFMSRPEYAEKTRQLVEAAFYRHWDEQLSQAAVRAVYGGQLTGGVTMLEKYAACAYAHFLSYGLHLKERKIYQVQAPDIGMIFHQAIERFSLRIGRSGYQWRTISDEIRDHLVEECVSSVVLEYNHSVMQDSMRANYLTEKIMRMTKRTIWALQQQLKKGDFEPVGYEVRFTTELENQQMHLSYGDRGIMSLNGKIDRMDLCEEDDKVYLKIIDYKSGRTKFDLASVFHGLQLQLMVYMNAAREEQQQKKKQCIVIPAGILYYHIDDPFVTSDSFRDFAGNQPVGSDEQNENYSDSSGAAEDVLSILEQLAVDGLVLDDDDAVRHMDHHPEEPPKVLPVKIKKDGTLSALSSAAAPENFEVLSWHVKRTTKRLGEKIFSGDISVHPYRYGTQKACDYCSFKSVCGFDPAFDGFDWKRLKKMNKDEIWEAIRKEAGEMQSDTRIFVFRLRQLLTFLLVLIILIAAAVFILFVIGSSKKDVQTSPASAYTAGVYTSSITLNNQSVDIQVVVDKDHIKSASIVNLDESVAAMYPLLTTSMDAISAQLAAGVSIDDIRYESSSRYTSQVLLSAIAQAIDKARMFDGFLRVAAATPDIRVADCNFNGASAVALVSEAYEQGVSLLVLPELCLTGYTCSDLFLQESLLDGAEKALLTLTEATRDKNMVVLAGLPLTVNGVLYNVAAVLHDGDILGFVPKSYLPTYSEFYEGRHYHSGADIETDVLFNGRTYPFGTRLLFRCRQMPAFTLGIEICEDLWVAQPPSISHALAGATVIANLSASDETTGKDIYRRSLVSGQSARLVCGYIYADAGEGESSTDLVFGAHNLICENGSILAESERFSNQMIMADMDMSKLISERRRMTTWQPKFDNGYRVIDFDLELHEVDLRRFIDPHPFVPDDAMDRTRRCEEILTIQAMGLKKRLAHTHCRHAVVGISGGLDSTLALLVTVRAFDMLDMDRSQIMAVTMPCFGTTDRTYHNACELVRRLGATLEEVDIKEAVTLHFSDIGQDPANHDVTYENGQARERTQVLMDIANRLGGMVIGTGDMSELALGWATYNGDHMSMYGVNASVPKTLVRHLVRYCADTADSQTLKETLLDILDTPVSPELIPPEDGQISQKTEDLVGPYELHDFFLYHILRFGRHPAKVYRLALKAFEGVYDAATILRWLKTFYRRFFAQQFKRSCLPDGPKVGSVAVSPRGDLRMPSDACVTLWMQELDEIVEMEQMDDLQKRYLKLLSEKYPTIASASTEIINLSAIMNLPKGTEHALSDIHGEADQFFHVLKNGSGAVRAKIDEEFGNSISMKDKKQLATLIYYPEKKLELIEKEEDDIEDFYRMTFHRLIRVCKRSQSKYTRSKVRKALPKDFAYIIEELLYEREDILNKEAYYNEIINTIIRINRAKEFIVAMCNLIQRLVVDHLHIVGDVFDRGPGAAAIMDRLMSYHSVDIQWGNHDVLWMGAASGHPACIANVIRISARYGNLNTLEDDYGINLMPLANFANTVYGDDPCSLFAIKHVEREDYSISQVEEEVEVKMHKAIAIIQFKLEGQLMMRRPEFHMADRLLLDKINYEKGSITIDGKEYDLLDHNFPTIDPKDPYALSPEEEDIMNRLVNAFKGCEKLQKHIQFFFKQGSLYLCYNDNLYYHGCVPFNEDGTFRDVTLKGKKYSGKALYDFLESCARKGYYMSSDPEERLYGQDIMWFIWSNEDSPVFGKEKMATFERYFINEPSLKEERKDYYYKLIEREDICDMILREFGMDPKRCHIVNGHMPVKFKKGESPIKGNGKLLIIDGGFSKAYQKTTGIAGYTLIYNSYGLRLVTHEPFESLEKAIIEETDIHSNITVVQLVNERRLVADTDVGKQIRKDIVDLEQLLDAYRRGLLREKRMVKIIMHGCNGAMGQVITKLAAEDKDAEITAGIDRVDSRENPYPVFTSCDACDVEADVIVDFSVAQAVDGVLAYALKRKMPLVLCTTGLGEKQLEDVKTASAQIPILRSANMSLGVNTVFKLAAAAAKILGEVGYDIEIVEKHHNKKMDAPSGTALAIADAINEAMDDRYTYKLDRSAERARREANEIGIQAVRGGTIVGEHEVLFCGPDEVIEIKHTAYSKAIFGKGAIQAAQFLKGKKPGMYQMSDVIGMAIFKGAGVAIVTPMHADGSVNFEKLEETIDYQIENGTDSIVICGTTGESSTLSEEEHIECIRTAISRTAGRIPVIAGTGSNSTETAIYLTKEAEEAGADGALVVTPYYNKATQKGLVAHYTEIAKHTDMPIILYNVQSRTGVNIAPETAVTLAKTCDNIVGIKEASGNISQIATLMQLADGCIDLYSGNDDEVVPILSLGGIGVISVFSNICPRDSHDIVARYLAGDVKGSLEMQLKALPLMHELFNEVNPIPVKAAMNLLGMNVGPLRMPLSEIEPEHKARLAAAMKAYGLKLAEMQMNGLERMICRSFIFPGRYIAGHTVKSCMTVIILMECCLKNFHSMEKGLVKIYFGEGKGKSTSSMGRALVCAGEEKEVFVIQFLKGKMTGSLDYLKRLEPEIKVFRFEREEAFYEDLSDEEKQEEKVNILNGYNFAKKVLSIGECDVLILDEILGLVDLGIITCEDVIRLIDMKDESVELIMTGRHLPEELIPYADYISRLDIVKGACSEKPSCMMADKAMDNNQVTIVGTVDSEFTYSHEVFGEGFYMLEVVVNRLSHMEDRIPLMVSERLVDVKESCRGKIVEVHGQFRSYNKHEESRNRLILSVFVREFAFVGEEGTLTKPNSIYLDGYICKPPVYRMTPLGREIADLLMAVNRPYGKSDYLPCICWGRNARFAGKFEVGTHIHLWGRIQSRTYQKRLDNDVVEKRTAYEISVSKIECVEMIYHEKKFSFIDRFFHIMAFAGGHRSFFGLLNAFIPFYYRFPQMNIKREDTRNIAIIAHVDHGKTTLVDELLKQSGVFRSNQVVQERVMDSNDIERERGITILSKNTAVFYKDVKINIIDTPGHADFGGEVERVLKMVDGVVLVVDAFEGPMPQTKFVLKKALELNLAVIVCINKIDRPEARPDEVIDEVLELLIDLDASEEQLDCPFVYASAKEGVAMLEIGDDSNSMQPLFETIINHIPAPEGDPDKGTQVLISTIDYNEYVGRIGVGKVSNGSIRVNEDAIIVNAHDPEKRRKVKVSKLYEFDGLNKVEVEKAGVGSIVAISGISDIHIGDTLCSPDFVEPIPFQKISEPTISMNFLVNDSPLAGREGKFVTSRHLRERLYKELNTDVSLRVEDTENTDCFKVSGRGELHLSVLIENMRREGYEFAVSKAEVIYHKDEKGHLLEPMEQAVIDVPDEFSGIVIEKLSFRKGELQGMSRSNGGYTRLEFLIPSRGLIGYRGEFMTDTKGNGILNTIFDSYGPYKGDIAYRQTGSLIAFEAGETITYGLFNAQERGTLFLGPGEQVYQGMVVGENPKGGDIELNVCKRKQMTNTRASGSDEALKLVPHKVLSLEQALDFIENDELVEVTPKNIRIRKKILDPKQRMRANKKMKLKCLGRIFACMAVLMAMLLAAGCQKSGNSSEESANAVLNQFLSGTVQDADEFDSQYAEIASAETGDETGMVSIDGMEEYFQKQFGEIMTADCIADLLADRSMIAPMKLAQKLDKDIIAQDIQLTAKSGEDNAYDFSTQLVTSDDKQPVGTATGYVKMQSDNSNWKASALTIKITTDMVTALNLIIIKYIVVERKYMRLKCLKNIYVGVILLVVVMMAAGCRKSSGSSEESATAVINQFLSGTVQDANEFDSQYAEITSAETGDETEMISVAGMDDYFQKQFGKIMTDDCIADLLADRSMIAPMKLAQQLDKDIIAQDIQLTAKSGEDDAYDFTAQLVTSDDKKSVGTAAGYVKMQSDNSNWKASALTIKIATDMKNGKFKRFMAMVSCVLCMSLFTANVFAATNDAASDSNEAHVYGVDVENSGEPGQLLTSRAIAECGSGSHDMRAKGWGDIVNVDTGKTVVNNGSCSQCSKCYLVIVTQGEPGTGKALGYYTTWQPHEKLTSYVTVIRQSGKNIWYTSKSTIPGISFRYMDHSESPIILRLKKATTELLLLSLLSEEDMYGYQLASEIKQRSHELCACKETSLYPILNRLLEKDLVSTSNVVTEKKKIRVYYHLSETGKEYYEDMKKNYAAYITTVNAFLKLEVMEVPSSITDKEIHNYLSEIKHQLTFTHSPKETASIMQMIESSIDDFLSEHPSATINDLTNHFGSTDEFKEMFISCAESEQLENHLNNSHTKRKYIKIFLFVVALILLIYIGIRIKFYIDLAQEIPAYEVIRIEMKKIFIFILAFLMSFNTICSLPVFANTINGGSTTEYTFYDDGSYMVTRITEEPNAITTRSSSTTTKSKISSYYSNNNVELWYVKVTGTFTYNGTSSKCTDSRVTAASYSSAWKISNKSASKSGSSATAKATANFYVGSRIEKTINKSVTLTCSAKGTFSMKVLVIPDVHLKPWMFEQAAVLMRAKQADRAVCLMDIPDDWGKEYDIALYEQTYDAAIDFAKEFPETAWCYGNHDLSYLWHRIESGYSSMAAYTVQRKLLDLRDALPESNPIRYVQKIDNVLFSHAGVLDYFAESVVPKAKYHDVEAVVAAINELGPNEMWNDASPIWLRPQHSNMRLYKPRKLLQIVGHTPMDMITKEGNLISCDVFSTYRDGKPIGTEEFLLLDTETWECSGVKMADKYVAYVGSYTRGESDGIYILDANVEYAYFKVRDSFKINNPSFLRLSHDEQYLYSNCDEGVASFKILPDGGLELMNKASVNGLRPCYLSVDRANRYLLTAGYHDGKLTVLRLNEDGTIQGVTDEVFMKGLGSIAGRNYRCHVNCAIFSPDERFIMAVDLGMDQVKVYEFDHETGKIKLHDILRCELESGPKHMIFTSDGRYAYLTHENKCCVTKYAYDAETAHFTKLQTISTLPEKYDNYNSAITLKLTPDDRYLFVTNSGNNSVAIYEINEEDQMMKTLCILPVSGEYPRDLAIMPGDQMFVSVNQEGNSMTSFKVNYDKGYIMMSGAPLKMPSPTSIQLKQIFEMEKIASFTIDHLKLVPGVYVSRKDTIGKEVITTFDLRMTSPNDEPVMNTAEVHTIEHLAATFLRNHPVYGDKTIYFGPMGCRTGFYLLLAGDLTSKEIVPLMIEMFEFIRDFKDEVPGASPKDCGNYLDMNLPMANYLAKRYLDNVLYNIDDSRLVYPEMNPSVNISRYQRLDGTVLKLIACLSMFIDHLGAVCFSGMMGFRIIGRLAFPIYCFLLVEGAVHTRNMKKYILRMGIFALISEVPFDLAFYHRLVYTGHQNVFFTLGLGLLAIWFLEHPIEQLDIPDVLYKLLVIIAAGLIAEFFNTDYGFTGIAVICIFYYLRGQPQLKYPIAAILLAAMGGVEVYAVLALIPILLYNGQRGRQTKVMQYGFYIFYPTHLLLIAALYHLFILMNIMNIEHISKIFGEKTIFDDASIGIQEGDKIGIVGINGTGKSTLLRMIAGDEVPDSGNIIRQNQLKLAWLPQEPKFPENATILSYAGDDETGWKVQSNLSQLGIMDYSMPIDQLSGGQKRKVALAKVLAQDFDVLLLDEPTNHLDSAMIRWLEDYLKNFRGTILMVTHDRYFLDQVTNKILEISQGKIYSYESNYSGFLELKAAREEMELATERKRQSVLRMELEWAKRGCRARTTKQRARLERLEALKNGTAPEQAQVVEMDSIETRMGKKTIELQHLSKRYGDKVILDDYSYIFLRNQKVGIIGPNGCGKSTLMKMLVGQVAPDSGVIEIGETIRMGYFAQDEKEMDDRQRVIDYVKDIGEYIITRDGRISASQMLERFLFTPEMQYAPIGKLSGGEKRRLYLLGVLCQNINVLLLDEASNNLDIPTMTILEDYLNSFVGIVVAVSHDRYFLDNVADRILEFDGQGHIRQYEGGYTDYLEAHEKRFGTAPDMSLTNKTKADSGEKKNNSKDWKQNRPVKLKFTFSEQKEFDTIDDDIAALEAKIEQIDADMMKFATDSGKLNDLMKEKDANESALEEKMDRWVYLNDLAERIEAQKQGGKMISANNVTLRIGKRALFEDVNIKFTEGNCYGLIGANGAGKSTFLKILSGVIEPSKGDIAITPGQRLSVLEQDHYKYDDYQVLDTVILGNKRLYEIMKEKDAIYAKEDFTDEDGVRASELEGEFADLNGWEAESDAATLLNGLGIDTDLHYAYMRELDGGQKVKVLLAKALFGNPDILLLDEPTNHLDLDAIAWLEEFLINFNNTVIVVSHDRYFLNKVCTHIADIDYAKIQLYSGNYDFWYESSQLMIKQMKEANKKKEEKIKELQEFIQRFSANASKSKQATSRKRALEKIQLDEIRPSSRKYPYIDFKPNREIGNEVLHVEGISKTIDGVKLLDNISFTLGHDDKVAFVGPNVNATTALFKILAGEMEPDEGSYKWGVTTTQTYFPKDNTAEFTSEDSIVDWLMQYSPEKDVTFVRGFLGRMLFSGDDGLKKVNVLSGGERVRCMLSKMMMSGANTMLMDEPTNHLDMESITALNNSLIKYPGVLLFTSQDHQFVQTVANRIMELTPGGLIDKQCTYDEYLENDEMARKRQILNMEAEADDMIKNKRLLLIILTIFILAAAGSFFILFVDQWHIEINDGSENNVKIEYGDTYDDGTVTAALKGRYLLKKGFPVTVTSEGSVNTSKLGSYTINYHASFLFWKGADSKTVTVEDTVPPEIKLTTNPDHYTLPGHPYEEEGYTASDNVDGDLTDKVTHEEKDGTVIYKVSDNSGNETTVTRTIVYDDPVPPVLALKGDSEITIQAGSDYTDPGYTAEDNVDGDLTDKVSVDGSVNTYSAGTYSLTYKVQDNYGNEAAVTRTVTVEPVRQADTVKPSGKIVYLTFDDGPGEYTSKLLDILSKYNVKATFFTVGSGHPDLLKAEADAGHSIGIHSATHDYSKIYASEDAFFADLRKQQDTIENATGIRTTLVRFPGGSSNTVSKSYCSGIMTKLTKDLTDMGYQYFDWNVTSGDAGETTSTSVVVQNVISGIQQHDVSIVLQHDIKGFSVNAVEQIIQWGLAHGYTFLPLTAESPTAHHGVNNMRKKSHLSLAGYIVDIVDADMIDHPLAFRFGSLEPDLVPSFITTKHRIDLTFHKLEKKINKVIDEYDKNKGMTIGLSKDLGVITHYIADYFTFPHNIEYPGTMTEHIHYEAQLKVDFREFVRKMKETHAHFQEVNMRSADEICAFIKKCHTEYLHAVKSVENDCRYILQICAQVVGSILHLLQQNSMPLGCYMMDSSDAMQLIVLIVLLALSAFFSSAETALTCVSKIRIRSLAEEGNKRACLVKELTDNPSKMLSAILIGNNIVNLSASSLSTMLATKMATQLGAGANAATFVGLATGILTILILIFGEITPKSAATINAEKMALGDVVIVYWLTRVLTPVIFVINHLSYGVMRLMGINPNAQAKTMTENELLTVIDVSHEDGVIESEEKEMITNVVDFGDSVASEVMVPRIDIEFMDVESSYEDVLAVFRRDKYSRVPVYEGNKDHVIGVLNLKDVFCYSDLPSNFSIRKILRRPYFTYEFKRISDLMVDMQKNSISMAMVLDEYGAVAGLITLEDLLEEIVGEIRDEYDEEEKDDIRKVNEHEYTVDGTTKLEDIDKLLDLHLESEDYDSIAGHMIHELGHIPTEGEYIDINGIRFTVMKMDKHRVADIDIRLPEAETEQSPSEHMIFINKLKKPAPVAAPTTKVCPYCKSEIHIDAVKCPHCASDLEDTEQMGDIKNFIAARVAKELKDGDVVNLGIGLPTLVPNHLPEGVDLTLQSENGFVGLVPLEEGKESPHVVNAGGVMAGIADDGAFFSSADSFAIIRGGHVDVTVLGSLQVDEKGNIANYKIPGKMLPGMGGAMDLVVGARKVIVAMEHTNKGKHKILKECTLPLTAKGQVNLIVTEMGVMKVTPEGLALVEYNPEYTIEEIQAATEAELIIADDLKEMAVMAKTQITTAAEAASLVKDGMTVMVGGFMANGTPEPIIDELVKSNVKDLTIICNDAGFGRKKDKETGEWKGKASGVGKLVENGQVKKLIASHVGLNPEFGAKYFEGEIDLELVPQGTLAERIRCGGSGLGGFYTPTGVGTEVAEGKEIKTIDGVDYILELPLHADIALIGGHKADASGNLRYIGSERNFNPMMAMAADTVVAGVSEIVEAGQIGADYVETPGIFVDYLVGGAEMKIAVTYDNGEIFQHFGHTEQFKLYDIENGKVVASEVVGTNGSGHGALAGFLAEHQVQVLICGGIGGGAQNALAQAGIKLFGGCSGNADQAVEALLEGQLNYDADVKCSHHDHEHGEGGHQCGNHGCGSHSCHMPRPRKCRKVCCLPKVSEFMPFGGASDEACVVMTVDEYETIRLIDKENFSQEECGKYMHIARTTVQQIYDCARKKLAEVVVDGKMLRIEGGDYRLCDGAETTCGCGGCPKHRCRAQVLNKDKGDHMTHQSLKCHKAAILLGGHSSRMGGQPKFLMKDGKGQSYLKRQIKALEKADRIYLSAADAAQLALIQNVYKDKDCYGLIDVVKDCGPLGGLYTVLQQLKDEDEWIFVTACDVPELTESMVGSLIQVSADAYEQGYDCMVYQDSRGRIHPLCGLYRPSLLPVIQQMLRYKDYKMMHLLIRSRCLIVSSAEMGIPDACFVNINTPEAHERWKNTSLNMPKEQKILCICGIKNSGKTTYIEKLLKEIKSHGKSAAVIKHDGHDFEGDRPGTDTYRYHQAGAAATAIFSKNRYMINADEEIDLQQLINGFSDVDVILVEGMKQSELPKIEIVREKISRTLSCCGKNLIAVVTDCEADFDGIEKWPLEDCSRCLNYLLQGGLRYMDTSSLMKQILSSDNLNRAYLQVVRNKGAEGVDGMKYTELKEHLVKDGEIIKEQLRTRKYKPQPVRRVEIPKPDGGVRNLGVPTVTDRFIQQAIAQVLTPIYEEQFHDHSYGFRPNRCAQQAILTALDMMNDGNDWIVDIDLEKFFDTVNHDKLMTIIGRTIKDGDVISIVRKYLVSGIMIDDEYEDSIVGTPQGGNLSPLLANIMLNELDKEMEKRGLNFVRYADDCIIMVGSEMSANRVMRNISRFIEEKLGLKVNMTKSKVDRPNGLKYLGFGFYFDSRAHQFKAKPHAKSVAKFKKRMKGLTCRSWGVSNSYKVEKLNQLIRGWINYFKIGSMKILCAKLDANIRYRLRMCIWKHWKTPQNRAKNLMKLGIDRITAYKVGYCSRAYAHVCSCGAVNIAITNKRLASFGLISMLDYYTERCVTCMSSVRRIYVEKKPAYAVAAKDLFENIRDYLGIRTVTGVRVLIRYDIENISDKTYEEAKITIFSEPPVDVLYEEAFPMQEGETAFSVEALPGQFDQRADSAEQCVKLLNENEEPVIRSATTYVIAGACSVEELAHIKDFCINPVDSRENNADKPETLVTEYEEPADVKIFDGFRNMPEAELKALYDSLGLAMTFKDFRFIQEHFAAEESRDPSMTEIRVLDTYWSDHCRHTTFQTELKNVTFEDGDYKAPMQAAYDMYQAHRAEIFAGRKDKYVSLMDIALMAMRKLKKDGKLDDQEETDEINACSIIVPVEIDGKTEEWLINFKNETHNHPTEIEPFGGAATCLGGAIRDPLSGRTYVYQAMRVTGAADPTVPMEKTLEGKLPQRKLVTGAASGYSSYGNQIGLATGLVNEIYHPDYVAKRMEIGAVMAAAPRSNVIRETSDPGDIIILLGGRTGRDGCGGATGSSKAHNSQSIDTCGAEVQKGNAPTERKLQRLFRRPEVSRLIKKCNDFGAGGVSVAIGELAAGLQIQLDKVPKKYAGLDGTELAISESQERMAVVIDPKDVDKFMAYAEEENLEATCVAEVTEDPRLVMHWRGKEIVNISRAFLDTNGAHQETDVIVGTASKADSYFEEKTDVADVKAAWLKDLADLNVCSQKGLVEMFDASIGAGSVFMPFGGKYQLTPTQSMVAKLPVLKGKTDTVTMMSYGFNPYLSNWSPYHGAAYAVVESVAKIVAAGGDFSKIRFTFQEYFKRMTEDAKGWGEPMSALLGAYTAQIGFGLPSIGGKDSMSGSFNDIHVPATLVSFAVDVAKQQDIITPEFKKSGNKIVKFDIARDAYDMPDYEQAKALYTAIHQLIQDKVVISAYTLGFGGVAAAVSKMAFGNKLGAKIDSTVKAEDLFKTGEYGCMIAEVPADALDKVNVAYTLIGEVTDDAQFTYGDTVVTMDEALKAWTGTLEKVFPTRSGVEQKKIETTIYKEGSIVICNHKIAQPKVFIPVFPGTNCEYDSMKAFEKAGAKVQTQVFRNLSADGIRESVDAFVKGISDAQIIMFPGGFSAGDEPDGSGKFIATAFRNEKLKEAVMKLLNERDGLALGICNGFQALIKLGLVPYGEITPQQPDSPTLTTNNIGRHISKVAYTKVVSNKSPWLAGAVPGEVYAIPISHGEGRFVASDEWIKKLFAAGCVATQYVDLDGNPTMDEDFNPNASYAAIEGITSPDGRILGKMGHSERIGEAVARNIYGNPDQKIFESGVAYFKMAKKSITRHNEKCDHLDYLKTSASDTECTGVVYTGPLNDVELDNINDVYAFEPEPAKKREVMKENERRFTFLTGYPDSGINDCKKTLNKKAFYKKIVAMLKKYSIPIIMWLVFESIAVILWQALDNIFYLFNFSYIGTSIAIGLFLFARKQKYARHVIQFAVGLYMLGYLGFLQHENMQIEGFWYYLFLGVFEAATIHYAVAKIFGPFIFGRGWCGYACWTAMILDLLPFKTPASSRRKWGFIRYIVFVGSLIFVSSLFLLHVQNIEQIMWYSFLIGNLIYYVVGIALAFICKDNRAFCKYICPVTVFLKPASRFALFHIKLDPDKCISCKKCEKNCPMNVEILNITEQRKNHSECILCMQCVDECPKGALKLMELTEEKNGYLLCRMGLIKYYGHSGYIASVLEEDELMSVRANAAGIFRRLKGPNDTIRMGEVMAEIIDPYEGDVTMQIVAPTDGIVFFAHNEPLVLENTVVFKVIRRLHKMDINYELYKVFYYVAKTLSFSDASKRLFISQSAVSQSIKALEKKLNQHLFIRSTKRVKLTPEGEVLFKHIEPAVNLIMRGENQILDANALNGGQLRIGASDTICRYYLVPYLQAFHEHFPNVHIKVTNGTSGKCVDFLENGQVDLIVTNYPNPRMNTVGNIRKVKDFKDVFIANRNFEHLKNHPLNFEELLQYPILMLDKSSMTSEFLHNICQQRQLDLVPEVELSSNDLLIDLARIGLGIAFIPDFCLPDDDPDLFKLTMSEVFPSRQLVVGYNDKLPISEAAKYFIESLNEDKMGQPKDSEFKDRDTMTLDLDDGGKLECIVLNVFPVNNREYIALLPMNDEGHVEEDAQIFLYRFEELGDDEVNLETIEDDDEFELVSDYFDEMLDEQEFNELFNGAEMELNKSQLQAVCHDKGPMMVLAGPGSGKTMVITHRVKWLIEHAGVHPAGILVVTFTKAAADEMRQRFVSLMDGRTMPVSFGTFHAIFFSVLKHAYNYTASNIIREEQKQQLIREIIEDMPVEPDNVSEFVNDVLSEIGLVKGSVMDIEHYYATSCATSVFRDIYKQYVQRMENSRLIDFEDMLVYTWELFTQRKDILAAWQHKFQYILIDEFQDINLLQYKLIRMLALPQNNIFIVGDDDQSIYGFRGARPEIMLNFEKDFSDVKKVFLSVNYRSQAAIVRGAGCVIKNNKQRFDKQIQAVRPEEEPVDIRVFKGPADENAAVIREIRDYHDQGIPYHAMAVLFRTNTQARMLLEKMMEYNIPFKMQDAMPNIYQHWVTQDIMAYIQIALGSTARSHYLRIINRPNRYVSRQMLGERQVAFDVLLEQYKDKPWMQERLSKFAYDVHMLTQMQPFAAINYIRHGIGYDEFLEKYAEERKMDGQELIELLDELQDSARNYATYEEWFGHIEEYTEQLRKQARKQREEKTDGVALATMHHSKGLEYQIVFIVDANETVTPHHKALLDADIEEERRMFYVAMTRAKSRLHIFFLKERYGRPMVMSRFVGEILVDRDAVKPGMRVQHQTYGAGVIKEVTDKAIVIRFDKIRQEKKLDIQFCLANQLLKIQSMGKTIRTRFAPSPTGRMHVGNLRTALYAYLIAKHEGGQFLLRIEDTDQEREMEGAVDIIYRTLASTGLIHDEGPDKDGGVGPYVQSERQAQGIYLEYAKKLIDKGEAYYCFCDEERLATLHTTVNGKEIFHYDKHCLHLSKEEVEAKLAAGVPYVIRQNNPVEGTTTFHDEIYGDITVPNAELDDMILIKSDGFPTYNFANVVDDHLMGITHVVRGNEYLSSSPKYNRLYDAFGWEVPVYVHCPLITNEEHKKLSKRSGHASYEDLIDQGFLTESVINFVALLGWSPEDNNEFFTLDELVKEFDYHHMSKTPAVFDMTKLRWMNGEYLKKMDFDKFYEMALPHMKEVVSRDVNFEKLASMIKTRIEIWADIKDQIDFIEQVPDYDINMYVHKKNKTNLENSLEVLKEVQPLLEKQEDYSNDALFELLGQYAKDKEKKVGFVMWPIRVALSGKQMTPGGATELMEVLGKEESLARIQTAIDRLSQEAMFKNCVFKDSVNTRKWMVNAGIRAVKTMAQTAVAVMGTSTVLSAIDWRMVLSSAIVAGIVSILTSVAGLPEAPCEGEMPKKKDFILIGVLLVIALIGLGVTQFLQHQTGASVTITIGGEIYGTYPLDQSRTIEINDAKGYNKVVIENGSVHMADADCPDQYCVQHAAIHAGHETIICLPHELVVEITGGEVSDVDVVTQMTKKLTISALLVALAMILSYVEVLIPFNFGIPGIKLGLANLVVVVALYLLNARQALMISVVRILLVSFTFGNMAALLYSITGGLLSFAVMVLCRRIKGLSTMSVSVAGGISHNIGQILVAVFVVKNLNLLFYLPVLMIAGIITGLLIGLVAGLIIPSVRKALQLMYKVEIHVQEKGSKEKKETFVIGDIDSSAYHDEMNAVSDYLYGLDIPFDVDADGDMMIDDILISLSEEEDFEQSFTAGKTTYLVQGKKEDMTLDEIKVVGIAGAGTMGASMAQIFAQYGYTVIIYDAFEAGLERGKHLVEINQASLVEAGDITAEQSAEIKTKLSFTGDINGLKDCDIIVESVLERLDVKQDFWVKAEAVVSPDCILATNTSGLSINKIFANCKDKTRACGMHWFNPPHIVPLIEVINNDETKQEIADTVYQLSLKIGKKPIYVKKDALGFIGNRIQAAILREAVYIVEQGIGDYKDVDGAMKYGLGFRYACLGPCEVVDQGGLDVHHHIATYLWEDLSDAKYPSGEFEAIYQAGNYGVKTGKGFYDYSGDKADKAIEARDAMYLAMAKCNPTGVGEAHGYENMARIKGGLNAKKKHNRVLKLAKGYRGARSKQYRVAKQSVMRALTSSYAGRKQRKRQFRQLWIARINAAARMNGLSYSKLMHGLKLAGVEVNRKMLSEMAISDAAAFTALCETAKAKLAMPKVKTSRAAAKRFKKTGTGQLKRMKAYKSHILTKKSAKRKRNLRHAAMTDSTNAKVMKKILPYLMSIISELMINEQIRDREIRLIGEDGEQLGIMSARDAMKLAREANLDLVKIAPTAKPPVCKIIDYGKYRYEQARREKEARKKQKTIEVKEIRLSPNIDTNDLNTKVNQARKFVSGGNKVKVAVRFRGRELAHTAVGKTILEDFAQKLSDIAVIDKPAKLEGKSMVMFLVEKRNMEKIIELKNLTKNFDDQQVLKGINLDIHHNEFLTLLGPSGCGKTTTLRIIAGFEEASSGEVLFDGMDISKIPAYKREINTVFQKYALFPHMNVFDNVAFGLNIKKMDKAVIKTKVERMLSMVGLANYGSKDVTLLSGGQQQRVAIARALVNEPKVLLLDEPLGALDARLRKEMQTELKKIQKEVGITFVFVTHDQEEALSMSDTVVVMNEGTIQQIGTPIDIYNEPENRFVAGFIGESNIIEGVMIKDFLVAFDDFEFICVDKGFPENEPVDVVIRPEDIDIVQPDKAKLKGIVKSVTFKGVHYETIVTTKYRDYRIDTTDYFAVGLEVGLTFTPEDIHVMWQMGSYMKHFRKLTGPYFAWLVLFVLIPLVLIAIYAFTTSGNPVKTLNFTLMNFAKINEPTYIKVFIKSIEMGVLTTGVCLILGYPMAYLIAKCPEEMQDMLIMAVTIPTWINMLLRTYAWMNLLSDNGIINGLLSVLGINPVTMMYTNFSVVVGMVCNFMPFMIIPIHTSLRKMDNSLIEAAMDLGANPFQTFQKVVLKLSMPGVINGIVMVFLMAISSFVIPKLLGGGQFVLIGNLIESQFVSVGDWNFGSAISLILAVLILVAMRLMKKMDVQDNMRKKNSLFSKFYIAICFAFFYLPILVTMVFSFNSSKSLSKFTGFSLRWYKALLENSEIMSAVYVSVTIAILATIASTVLGTMTAIGLSKSRKIIKDMVLSMNDIPILNPDIVTAIGWMLLFSSLGFQKGYMTMLLAHIAFCTPYVITSVYPKVRSLDPNLANAAMDLGATPYQALTKVILPMIRPGIFAGALLAFTMSFDDFVISYFVSGNGVKNISIVVYNMTKRINPTINALSTIVIVVIVVILLLANLLPRLGGGDNKKNNQNMKKLVAGVAVFALVLSLVTCVANKSNNKEARVLKVYNAGEYIDSDLLTEFQDEYNCTVIYETFESNEMMYTKLQAGDAYDILIPSDYMIERLIREDYLQPIDWDRLTNAEGLNPDVMNKEYDPGNVYSVPYFWGNVGILYDKTVVDPADLSEGWNLLMDTKYAGNLYMYDSERDSFMIALKALGYSMNTHDKNEIQAAYEWLIQQRDTMKPVYAGDDVIDNMISGNKALAVVYSGDGAYIMSENEDLGFLMPEEGTNLWYDAMVMTRDCENTELAYEFMDFMLRDDVAYRNTQYVGYSSPVVAAYEQAQEEDYEGIEAYVPRVGYEKDEIFRYQDTDIKKLFAELWTKVKAQMKQMKLSVGVSDFEKIRSDGYYYIDKSGWIKGLLKSGAEVTLLTRPRRFGKTLGMSMLANFFDITKDNRALFEGLEIMKDTELCQHWMNQYPVLFLSFKDVDGTSFENALALLQFTLSQFCDVYAYLEDGEQVTEVQKAIFHRLKMQTASLVDIQSALLVIMRMMWAYYGKKVILLLDEYDVPIAKASSKGYYTEMMEVLKTMLSISLKDNSVLELAVVTGCLKIAKESIFTGTNNFVSDTISMSRFNEYFGFTQKEVDQILLDAGAASHAQQVKAWYDGYHFGEYDIYCPWDVMNFVRDFQFDATVKPASYWKNTSDNAIIRSFIDFAGNSITAKMETLLAGGYIIERIEENLTYDYLHASEDNLWSILYLTGYLTKVRDRDIKMPLPDGMTALLIPNAEIREIFETTVKKWFEDKARTWNKRLLFDAVWCGDSETLTQEMNKLLRQTISYHDYREDFYHAFLAGIFTGAGYMVQSNKEHGEGRSDLVVMDTENGRVAVFEAKYSKMFQQLESDCNKAINQIESRMYAREFEENGDDVFCYGIAFFKKRCCVKIKSMINYSEDASRQYHIQVAKGEVSRYVILPGDPKRCVKIAQYLEHPVLIADNREFTTYTGTLDGVKVSVTSTGIGGPSASIAMEELYRCGADTFVRIGTCGGMQPDVKSGDIVIATGAVRMEGTSKEYAPIEYPAVPDFGVTTALVSAAKALKMPYHTGVVQCKDAFYGQHAPELMPVSYELQNKWEAWKRMGCLASEMESAALFIVGGHLGVRVGSCFLVMANQERAKLGLENPVVHDTDGAIHVAVEAIRNLIQEDRGMSERWTNTANDKGELSEMLIQSLIETAVKQLRFSYTPYSHFKVGAALLAADGTIYTGCNIENAAYTPTNCAERTAFFKAVSEGVRDFRAICIVGGMNGVLSGYTAPCGVCRQVMMEFCDPETFQIILAAADGKYKIYRLKELLPEGFGSDNLVISGGFRSKMRLTELRIRNYKSISDLLITDIENALILVGKNNTGKTAILDAIRVVTGSCAVEMDDFQEDYANIEISVCLLLSDNDLKMLHAAGQISTYRRFDKWFQDFKRKLPSYDEATQALSFTFIANRDGKIRYSDGYQKNNNWIPRLLPPVYYLDPQRNLRQFQDDLLLMQEDSLLKQMRSGCCLFDSAKPCTHCFSCIGLINQKTPAELNAFEAARLLDYKLYQLNLDDFSRRVNANYKKNGGQHEIIYSMNRDIEQMLSVTAEIADEKQKTLRPIEHMGKGMRSIYMLSLLETYAEDDNPTPGIIMVEEPELFLHPKLQKLSGDLLFRLARKNQVIFSTHSPNLLPNFNSRQIRQVVLDSDGYSTVREHTDISVILNDLGYSANDLMNVDFVFIVEGRQDKSRLPLLLRKYYSEIYDDEGKPSRVAIITTNSCTNIKTYANLKYINQIYLKDSFLMIRDGDGKDADMLKHQLCRYYDERNISDIDHLPRVTEKNVLILKYYSFENYFFNPDVMAKLGVVPSPEAFYDIFYEKWHEYLHRLSSGEKLVAAIGHDLTSPEDVRQHMEDIRIHMRGHNLYDTFYGRYKDSETELLTRYIEIAPKDDFKDILDAIDHFIYFENRRKMTTNDHRPVLRGELVLVLAVIINSIGVLLMLHSGSGISAISSVPYAFNLVLPTLSLGTWTYIFQGLLVCVLMILRRKFIPAYLFSFVVGFCFGEMMDINELWVDHLPLSIPLRVAYFILSYLILCFGIALSNRCKLPITPTDLFPREMEDITGKPYSKIKISYDVTCLIITACMTFFFLGHISGLGIGTVLAAFTMGKGVALVGKKIDKKAAFVSFLEHMKKVLVVGSLNMDMVLSVDHHPVPGETIIGDGITYHPGGKGANQAYAVGKLGGDVRIIGCVGWDNNGMILTENLAQAGVDTTAINRMPEAPTGMAIIDVDKKGDNSIIVISGANACLTPDLLRKQKASVEWSDFIMTQLETPIDTVLELARMAKKADKCMILDPSPARADLPDELFPLIDIMKPNEKELSILTGMPTETDEEIKAAADALLEKGVSKVVVTLGARGAMLADGNEKLFFEAKPVVPVDTTAAGAAFTAAMVNGLAQEMGMIQAIRMANGVASIVVTRHGAQASIPDRDEIDDLIWNYMISKEKDFQEFFPVWNKLTAGQQEQLEHAVRYEHAKKGTIIHNGSLDCVGVLLIHSGQLRAYMISEEGREITLFRLFERDLCLFSASCMMPNIQFDTIIEAEKDTDFWLIPPNVYKSVMEASAALANYTNEILSSRFSDVMWLMEQIIWKSFDKRLAEFLIQESDIEKTNHLKITHEKIANHMGTAREVVTRMLRYFQNEGWIRLSRGTIELIHPEKLTALTENMREFNKRTLDEYVAEGKTVLVEFSAPWCVYCRRLAPAMEKIAEEYKDILTVGSVNIDNEQELARQERIEVVPTLVLYKNGQAVDSIVGPGSKAAVEDFIQKNSMRHLYDVIIIGGGPGGYTAALYAARASLDTLVLEKLSAGGQMALTTQIDNYPGFESGIDGFTLGEKMQQGAERFGAKTEIVEVDGVHLQGPVKTVHTNEGIFEAKTVILAMGAHPRKLGIPDEARLVGHGLHYCAACDGMFYKDKTVVVVGGGNSAAADALLLSRICKKVILVHRRDELRATKIYHQPLMQAENVEFQWNQTVESVIESIVADDGHDGRQGRRFSGGRNHVQITGVRLKNAATGEKQEIVCDGIFVSVGREPETRMIENQVVLDENGYIIADESTKTNLPGVFAVGDIRTKALRQIVTATADGANAAYAVEEYLANKMEKLKPMLWSVMKGYTKEQLVKDIVAGIIVAIIALPLSIALALASGVTPERGIYTAITAGFVISFLGGSRVQIAGPTAAFATIVAGIAAENGIEGLALATVMAGIILIIMGVCRMGSLIKYIPYTITTGFTAGIAVTIFIGQIKDFLGLTVVSEEPLIETMDKLVGDIRFISTINVQAVIVGAVCLAILIVWPMINETIPPSLLAVIAGIAMVKGLHMPVNTIGDLYTISNALPALTVPVFNFDMVQKLLPDAFTIAILAAIESLLSCVVADGMINSKHRSNTELVAQGAGNIVSALFGGIPATGAIARTAANIKNGGRTPIAGMVHAVVLLLILVVLMPYAALIPMPTIAAILFMVAYNMSGWRKFVYLLKTAPKSDIIVLVLTFGLTVVFDLVVAIEVNVVLAAMLFMKRMSEETAVEGWKYVESDDDDPDSINLRDVAKNIRVYELSGPLFFGAADKIAEIHAKDFNNCLILRMRSVNAIDATAMHALELLWEKCQKKNVTLIFSHVNEQPMSAMKKSGLYDKVGAENFCAHIDDALERGAELGESRQMGKLIIPENYRSCLSSYETQEAIGMIKILMQKKLCMALKLKRVTAPLFVDPASGLNDDLNGVERPVSFDIPDAHMEAQVVHSLAKWKRMALYNYDFPVGKGLLCDMNAIRRDEELDNLHSAYVDQWDWEKVITEEDRNFDYLMTTVNRIVESICNTLDEVKYQYEHLHTELCREVSFITSQELEDMYPDLTPKERENAYAREKKTIFIMQIGDLLKSGERHDGRAPDYDDWQLNGDLLFWHEPLQCALEVSSMGIRVDAKSLDEQLTKAGCDERRKLPFHQLLLSNRLPLTIGGGIGQSRICMLLLQKAHVGEVQASVWDKETLQQCESAGIEILMNYVEWNNLYENTEKLLHDVFDALYFQILLDTDGRIVYINQIYADFFGMKKQDIIGMKIEELIPNTKLYEALQTGEAKYDQLFETVDDRKVLYNCLPIKNEYGEILGVATASSLNTALQIENLQERIERLEESNILLNRQLHGFNQAPEIFESIIGISDKIIELKKILSRICNTPTPILLTGESGTGKEVFATAIHNASDRKNSPFIKINCAAIPSTLVESELFGYETGTFSGAIKGGKAGKFEQANHGTILLDEIEELPLEAQSKLLRVLQEYEVERIGSVQPIPLDIHVICCSNQDLYQMVKEKKFREDLLYRINVIELEIPPLRDRMEDIPLLCQSLIHRINEKYHLQIKNVSKSALQYLSTYSWPGNVRELGHAIERACIMSDSTTLTKQDFDFLKKKFHIQQIHENALSTDSTLTASASTASSASSVMPSESNSLFSKKEEYEKQEIQNALKKCAGNKTKAAKELGISRSLLYDKIAKYGINMFDNLYKYVYIIQQFLHPCKEKREILSKNADFGAVLELAWIMLYIMRIAIMGAGSLGTILGAYVSKAGYDVVLIDPYQEHVDALNKDGAHVIGTVDFVQPVKAITPDQMDGVYDVVIYMAKQTYNDTAIPQIQAHIDDNSTVCVCQNGIPEYAVSAVIGTERVVGAPVGWGATFQGPGCSALTTTEGRLNFTLGSLDGPINDHVKRVKPILESMGEVIVSENLLGLRWTKLLMNSTFSGLSTALGTTFGGVMDDDVAMQLILKDGKECLDAAANAGITLEPYEEYDFYQAFKRGNEATNDASIALIREIWQPHYKLTASMAQDLMKGRKCEIYDINGVVCDTGRKYGIPTPVNDRIVEVVAGIQDGKYQYSPENIKYFKDLLMSIVPFVFWGASILSGFVIYVSVATVIEKSGLKRLGATGNLFTCDPKEDDKMNIYLIVFIVYFGIIIATSIMGSKKVESMEDFAVGGNKMGLLLGVGTSMATWLSVASVMGVPGNIYSRGVCAITGWIAGWFFATAVMPMVAYKIRRPAVPCRTFPELINLRYDPHNEKSPIRIFVAAVELVGYFVFSFIQIQGFGIVLSSITGISYNICCVAFMIILIFTCMGGFESVARTDTANAILILIGVIAGAVTVMHLTGGIGNIVENFVTTTAPAIEGQPALEAGVLGSSWGVFGVSAIISTFLSNAFGSIVAPHWVARFMAPKNAKTAALQMFCVLLLLIPVFGCLIIIGMGGKMILPTLPVGVTTDYMFPQLIMNYLNPVLGALALTAICAAAVSTANSMLLHCSTSLVYDIKRVLQDKKASAENDDKTTKELRMWVLLLGVLAVLGAIAQFSLLAQGFTYVYGAFGSMFFAPILFGLFVKRMNQPAAWTSMIVGLIAYLYCTICGAPLGLPTFIVSAGLSVISAIIVMNVTKKPPVETYEAFFFDEVSEETLRTIHKIRKDIMILDAKEQWYTLENLEKVEHLQLLPIDADAIENGKRCLEIPEGVKSISEDAAAVYNIGSIVSNISYILDHRELQRIEWEKKLRQRRLIKMTFPKEAGATASERSAYLVGKELRVRLVKMHLPASLESVSAAAFPRFLEAIEVDEGNAQYASVDGVLFSKDLKKLIRYPGYAGDQYSIPEGTECIAQEAFSGCYLKKLTLPASIKTIERNAFRGMSGLEEMDCQSEDIALGTGLFSESKLDQIDWWPWDSITKAAFMNSSIEHIRIPEGVEAIEDYAFAGCRYVREITVSEGVKSIERNSFRLGMGFDGNVFLPLHLYPMIYRFPPLTTINGMPKRKISERYLSGENCREDREVMIEQQLELETALGKLNFMNIAARRYIQAELQCLNSMIMREVKDITAMSVDERIAYAKANSPLTEEELQMIKEGSALTTDRADQMVENVIGVYSLPYSIAPGFVINGKEMIVPMVGEEPYVTKSTTSGARLAAANGGFTASTTGPFMIGQIQMLNIENPKTARLKILEDKQRLIEAANKVDPVLVSFGGGCTDVEVRTIETMIGPMVIIHLIINVCDAMGAQAINAMVEAAAPIAEEITGGKANLKVLSNYAIYRLARARVCIKKEDLGGEENVDKFVSAYAFAAADPFRAVTNNKGVMNGMIPVVVATGNDTRAVESGVHSYAARNGRYSTITIWEKNNNGDLEGMIEVPMAVGTVGGTTKFHPAAQVSLKMMGITKADDLEKVIVSVGLAANLGVLYSLVTVGLHGDFESARKMAKKTIITAAVTGAWPKKENNPNVPMTPSEIADDVYACWKAGAAIAHLHMRDDNGNGTMDKNKFIETVNLIHERYPDCDIILNLTTSGDIYATDDTRLEHVQILKPEMASYDCGSMNWLNASLFINSPAFLERCGKLFQELNVKPEIEAFDPGMIANAAYYLKKGVLKAPLHFQFCMGCANGIPGSVKNLVFMKETMDQLCPGSTWSTFGVGHSAMEIMYAAVALGGHIRVGMEDNVMYSKGVLADSNAQFVERAARVIREYGNEVATPAEAREILGLKMNKNTLYTYRHNCEKVWQSVFVCEKMLLYPWLFDSKMMEKSIFMLTIVYGDAENSIYNTSVYFKNSYESEWFDSELAKEIVRDVDHSDVLSGECIQSPVLGQIPPERLSGGVKTLLLMLNEPDKIFNASTCGDNCAKWILEIGKRQDITINLRHMMDFGMNTRFDIVIKNGGEVVHSMKELIPVANQYLNAMRQEQDMKGAHRVIVETKKIKYDFVVKRNITILTGDSGSGKTVLIDYIRDYRRYGADSGVFVSCDCDCRTLDNEDWERQLEEITGSIVFIDEGNRFLPTQRFAELVQQSDNYFVIATREKLPMLPYSIKEIYGFRESGKFRHTKQKYNEIYHLYGEISNSDSIEPEYVITEDSNSGFDFFSSLSAEKHINCISANGKSNIIKRLQEEKICGTVLVIVDGAAFGSEMRDVSKYLEAEKNIVLYAPESFEWLLLASNTIPHLNVSAILEQPENYIDSAKYISWERYFTDLLIDSTKDSPLWRYAKKKLPAIYSSPKVIKTVKKVMKLIVWDMSISFFCRNIAKMQWKAKKNGYFYIRVASRNITTEVQMKHEIQMLSEQLQNVRLEVEGAIAIVTMARPKAMNALNNQTLGELESLFHYFKKDKDILGVIITGEGKAFVAGADISQMNGYNAEQGREYADYAQSIFNKIEALEKPVIAAVNGYALGGGCELSMSCDIRIASDKAIFGQPEVNLGVIPCFGGTQRLSRLVGTGIAKELIYTARNVKAEEAKSIGLVNKVVPAESLLDEAKAMMQTILSKAPLAVRYAKVAINEGIQMDLYRGLELEKDVCALTFGSDDSKEGMSAFLEKRPAVFQNKMSGAEILSLIGIIIGLAVLVVLVMKGINIYVVAFIASIIVAVFGRMNLYEALKTDYMASFASFVQNYWLIFLTGALMGKIYEITNGAKSIARVIVKLFGKKYALVSIPLACGILAYGGVSVYVVSFAVFPIALEVFHEADLPRNYIPAALCFGCSTFAMVAPGAPQIQNAIPSSAVGEDLMAGMVVGFISCGVILVVGCFALMRMVAAQKAKGASFIAKPMDIFSDEDTKLPHPLVAFIPLIVTIILINVKINGQVICQLETGVLAGSVLALIMMWKYQDPSKLLGHVGDTCKSSLNAICNTSAVVAFGGVVKLAPAFAAVVNAMLNIPGPKILSLAIATTVLAGICGSASGGCGIASPLLGPAFVNMGIPAGVVARTISISSAALDSLPHNGYIVTVCNGLCNETHKDCYKPVFVVTVLVPFIGTLVAVALFSMFPNLPMFKPLEGVKVIDLTYFVAGPGAAKILADWGADVIKVEPSFGDPGRGTGGTMNDPTEKDCNPFYTAYNANKRGLSLNLKAQEGKDILDKLLETADVFITSYRTGALVRLGLDYDTLSKKHPHIIWAQINGFGDFGPAKDNPGFDTVAFWARSGAMIDIAEKNTSPINPPIGFGDATTSCSLSGGICAALYQKQKTGKGCKVMVSLFSQAIWNNSALIVSTQYGDEYPKTRRNAVSPVIDSFECSDGKWIFLSILEPDRYYNALMEKCLDRPDLKDDPRFTPAANGKANAEELIAVISEEFKKHTQDEMVRRLTAADIAHERIQHVQEVLDDPQALANKYVVPVQNLDGTFTKQSMSPVRFAVKEPTCIEDIDPTIECQAPMVGQHSVEILKEYGYDDAAIEKLMASGVVTVDTLMDFTYTEEQEMVRELAATFAKNYVAPLSEQMDIDNTMPHHIAEKMAELGFMGINVPEEYGGAGMDEVSKALVIMEIAKVDASVAELLAVHTLTNDIFLKRGTEEQKKKYLALGASGKVGAFALTEPGAGSDASAAKTKAISDGDDYIINGTKCFISNMGPEEGDYVVLIALTDPSAGTKGMSAIVVDRNTPGFSVGKLENKMGLRGANVSELIFQDCRVPKSNLLGKEGEGFKIAMAALDGGRIGMASQAVGIAEGAIDLAVAYAKERVQFKKPISANQGIQWYFADIATSTEAAKMLTLQAADLRQRGQNIGKLAAMAKYYASENAVTVTNKALQIHGGYGYMKEYAIERMYRDARITTLYEGTSEVQKMVISRAVLSMNYYKNIVSQILKMTSDGFIITDTEGNVREINKQYADFFGKSRSEIIGKSILNIIPNSKMIDIVKHKFSEEDAVHKYIDGEAKGNSVIVSRSYVEDEDGNVVAGVAQVKFKVQTLAVAKKLMNEYEELEYYREEFQNQNRVDNIIGSDPKFREIVKECLKVAKTDIPVLLTGETGTGKEVMAKALHTNSLRCDKPFVSINCAAIPFELLESELFGYMDGAFTGAKRGGKKGKFQLANGGTIFLDEIGDMPSSMQAKLLRVLQEKEIEPLGSEKSIPLDVRVVAATRQDLEAKMKDGSFREDLYYRLSVFNIHIPPLRERGGDSLELAEFFLDELNHKYKTYKTFSKAVKAYFLKYQWPGNVREVNNVVQSAYAISTENIIDINDIPARMLQQEKPAINLDKNKKSLGQMVDDYEKEVILELLKKHKGNCLEAAKEAGIHKSNFYRKLQKYGIKPAEVEMVNQTKQALEASLKHLLLQKPLDKITISDLTKDCGISRMAFYYHFKDIYDLVEWSCLEDATRALAGKKTYSTWTEGLLQIFEVVYENKPFIMNAYRCISREQIENFLFQLTSDLIMGVVKEQEQAANTTIPDKDKRFIADFYKYSFVGIMLDWIKQGMKEDYGEIARMIAITLHGGIANSIRNFTKAEEMAKKKLTLGMAAAAAAGTAVYVAKKSQDKKNQNGTSQNDIRDKANSGWSLTQHKINSGWTFNKKDNRNSAVNNSYRNTERGKYEKNSKGIYYTNGNYEAFARPEKPEGVDEKHAYIVGSGLASLAAACFLVRDGQMPGEHIHILEAMDIAGGACDGIFDPSRGYIMRGGREMENHFECLWDLFHSIPSLEIPGASVLDEFYWLNKHDPNYSLCRATVNRGKDAHTDGKFNLSQKGCMEIMKLFMTKDEDLYDKTIEDVFDDEVFNSTFWMYWRTMFAFENWHSALEMKLYFQRFIHHIAGLPDFSALKFTRYNQYESLILPMQKYLEDAGVDFQFNTEVTNVVFKFENGKKIASLIECKVNGKENGIMLTENDLVFVTNGSCTEGTIYGDQNHAPNGDAEVRTSGVWSLWKNIARQDPSFGHPEKFCSDVAKTNWESATVTTLDDKIIPYITNICKRDPRTGNVVTGGIVSCQDSSWLLSWTINRQGQFKEQDKDKVCVWVYGLFTDVPGDFIKKPMKDCTGKEITAEWLYHLGVPEDQIMDLAENSAICVPTMMPYITAFFMPRAKGDRPDVIPDGCVNFAFLGQFAETPRDTVFTTEYSVRTAMEAVYGLLGVDRGVPEVWGSVYDIRELLDSTVKLMDGKSPLDIELPGPLNLVKKPLLKMIHGTVVEKVLEDHDIIRKMYKFQLYKNTGRGIYIGAIDAITKAYIRKNEVFADAFNYFMYDGAQVIQPECLKELDPTEIAILLNEKDTKDKKAVQVEAHQKYRDILKSAAIMEDGHTAYILLGIENQTDVNYAMPVRNMLYDALQYTKQVSEIADVHRRKKENSNHKSVSHAEFISGFYKNDRLIPVITLVIYFNANEWDGPRSLLDMMEISDPIVRRYAQDYQIHLINPNQIADEELEKFQSSLREVMGCIKYSRSKEKLAAFINNNPRMNMEAAAARVIEAINHVPIRIQEGDGKFNMCEAIEEMIKDGREAGREVGRQEGQNRINQLIILLSKENRGEDIIKAAEDREYQEQLFKEFNLMWIIIAAIIIFIIFSNSGNKTSADTKVKTDAPLHCTVSRTGSYSSILNQMEQIVFLIAKRCPWMKLQVLVMVRKINASTCSVSFQIEDVYLKKNNITFGSEFQDRGDGSYECMHFETKQATGFTTPEAVKREMLCQFNWSQISTNITELKVLNYGAFTHTPMVTLRFEAQYRDMLKAYKYRIYPTNEQKEQIXXXXVYNRTLAYRKEAYEKEKKTVNKTNCNNYCNQVLKKEYGWLKEVDKFALTNAIYNMDAAYQKFFKEHTGYPKFKSKHDGHKSYTTNFTNGNITADFDRGKVKLPKLKEVKAKLHRNFSGQIKSAGKVKLPKLKEVKAKLHRNFSGQIKSATVSQMPGGKYYVSILVETEHVELPHTDQNTGIDMPKKNKTLCVDDLRHAEYYGMQPVFDELYHRSLEGENFTDLMDLILSRDNILLAYRNIKANGGSYTAGTDNKNISDIGCLPPETVAEKVRFIVTGSQHGYRPKPVRRKDIPKPNGKTRPLGIPCIWDRLVQQCIKQVIEPICEAKFSDNSYGFRPNRSVEHAVQKTYTMLQRMNLHYVIEFDIKGFFDNVNHSKLMRQIWAMGIHDKQLIFIIKRILKAPIRMPDGTTLIPDKGTPQGGIISPLLANIVLNELDKWVESQWQNHPLVKEYGYERKIRNSITFDRSKAFLKMRKTGLKEMYIVRYADDFRIFCRNKEDALRTKEAVTAWITERLRLEVSPEKTRIVNVRKRYSEFLGFKIRVRPKSRKYIVQSHICDKKLELERQKLVEQAKRIARPSEGKRPLDEIRLYNSMVLGIQNYFQLATCISIDCRKIHRQVMTVLTNRLNTETGCRLVREGGAMTESEKERFGKSAMIRYVSGIDQPIYPIAYIKNKIPMAKKAAVCSYTVEGRALIHTNLSMNSSVLSGLRNQPSMGRSTELTDSRISLFSAQRGKCALSGELFENAADIVCWLKTPAELGGKERYRNMILFHNRFLPLLQECPKNELKEIADTLKATKELMLKVNSLRQQAGLSAIENMAYVPVPKDLTKVKTKVALNLTNIGNNYLKGLFALAFQGFFMMVCVGIYAVLVNAMTISSDLHAAMFSVAAYTVILAFSLFKTGSLSKSIFNAHMLKAYKYRIYPTNEQKEQIAKTFGCMSWSLAFVVNSILLGVGLAMDAFSVSMANGLNEPHMKKRKMLGIAGTFGVFQALMPMVGWICVHMIVEYFSAFEKFIPWIALILLGYIGGHMIYESVCPRDSEEEETGVGFWALMVQGVATSIDALSVGFTIAEYDWLMALVCSLIIAAVTFLICIGGLFIGRKFGIKLAGKAQILGGVILIGIGLEIFISNVFMTDWKKYFNSTILSRGRQYYHEGRVKGLTHRDHEWFAAVKGSRSYNVIAQIGEDGDIEDMECSCLYAYNGQNCKHMAALLYAVEADQKENDVQTELELAQQRMDKEDKVIFKKLAAQTEYNYFDLNMAAQKLELSRSIWEKAKRLAEQKQIVLDDIQTGYLGWYGDSKLILHAEGRYLTKGNDGYAVQVLCSKDRVEQALCYVRGCRGSYTAPGEGYRAYSYGNVCVHEAALMYLMEDYLIAHRPGDATDLRGKQILGVYQQRYVKNSSNTSVSDKQTLYLEPRFECLSGGLAVSFKVGTGKMYVIKDLTEFVGQMERGDTVAFGKTTRINFAGCRLEETSEKYYAFIKRQIKEQQQRMRRDRTRSYYSMEEEIKGNIDLSGTGLDQIYSLIRDRKPECFKWTSQGRKKVYLECADGVPKMTMTVSRLADAGNQFDGIHVSCKINEVMEGTEAVYFLENHREKIVLCRTEREAIEGLLPLYNMSNDSGEIQFNIGRKHLADFYYRFLPEFKKYGSVKGAESRDILKYLPPEAKFAFYLDADEENLTCEIKAVYGENTVDVTCRGGSAEDFRDLFKEHEIMDQVMQYFPEVDESGSVFHCGREEALIYQVLDQGIEALMTLGEVNSTDRFKRLSIRRMPKVSVGVSMESGLMDLSITLDDMTNEELLEVLKSYRRKKKYFRLKNGDFVNIEEDSVEILGQMMDALHLSPKEFVQGKMQLPVYRALYLDKMLEQSSGIYLKRDSHFRKLVKDFKTVTDSDYEVPETLQDTMRQYQTEGYKWLRTVESGGFGGILADDMGLGKTLQMIAVFLAWKREGQKGTSLVVCPASLVYNWKEELARFAPALNAETLTGTQKERKEKISRYQEWDVLITSYDLLKRDIHEYEGCQFRGQVLDEAQYIKNHTTAAAKAVKLIHSQVRYALTGTPIENRLSELWSIFDYLMPGFLYTYEDFKKNVEMPIVKNQDKQVSDNLRRMTAPFIMRRLKKDVLKDLPDKLEKVCYAAFDTKQQKLYDGQVVHMQAMLEEQADAEFVQNKLKIFAELTRLRQVCCDPSLLYEAYDGGSAKREACMELISQAIEGGHRMLIFSQFTSMLELLEQDLKAAHIEWYKITGETAKEKRIELVRDFNEGTVPVFLISLKAGGTGLNLTGADVVIHYDPWWNLAVQNQATDRAHRIGQKNIVTVYKLIVKNSIEEKILEMQEAKKQLADEILSGEMGGLSALTKDELMALLKIMNFCYDVLNYKYPSRREVVYGRKGMVCTSQSLAAQAGLDIIKAGGNAVDAALATAACMIVLEPTSNGFGSDAFAQVWMDGKLYGLNASGFSPALLTREALMDKGYEQMPKFGWEPVTVPGAVSGWKKLHDRFGTLSWEKIFEPAICYAEEGYVVTPVISKMWRQAWDDYEESLSPELFEEWRKVFAPDGHTPRAGEIWSSKAHAETFRELAATDCESLYRGRLADEIDSYSRTTGGYLRKGDLVAYEAEWVQPVSTSYRGYDVWEIPPNGHGIVALMALNIMECMQFVAGHDSEEVVHRQLEAMKLAYSDGQQYIADPRSMKVTTEQMLSKVYAAYRAANIGQRAAKPQYGNPASGGTIYLCTADGAGNMVSFIQSNYCNFGSGIVVPKTGIALQNRGFNFYMDPESANCVGPHKKTYHTIIPGFLTRNGKAIGPFGVMGGFMQPQGHVQVMMNLIDFHMNPQEALDAPRWQWTGDMNIEIEQGFPMDMAGRLKARGHHVTVATDSMDFGRGQLIFRDENGILTGATEPRAGGAVAAWMKIAEIRNLSYSYRENCGQKKAVLNVSFDIDEGECLGLIGESGSGKSTIGSLIGNFLTGYEGSIHLMSNEKELADMSKKERHDLYRDIQVVFQNPWQSFPPNMCVGEGIAEGIRYYSRGLASDQKKLKEKVLETMHLVGLSASYYQKKCRELSGGECQRAAIGRAIIRSPRLLICDEVTSALDVSIQAQIMQLLFSLKKEMGMAMLFISHDLALVGGICDRVCVLHDGQLVEELPGGRKMYEKAEHPYTRLLMKSVLDIIMLSVEQLYVNYGEKEILHDVDLQVAQEEIVMIVGESGSGKSTLVRSIMGLLGEEGHITKGNIVFQGVNLCQLNKKQYRELRGSRIAMVFQQPESSFDPTQTIHRQFYEAMNVHRKVNVQEAEQTAKSLLGMLGFREPETILSKYPFELSGGMAQRVAIALAVVNEPAFLLADEPTSALDVVVQKQTLDMILDMRQKLHMTMLMVTHNMGVVAYMADKVGVMHHGHLVEWGKKTELLKNPQHPYTRELIRAIPTMNGILPQYQETPQMKGWKNKVWYSETHWALMAMKKKLLTIAVTAAMVFSLVACGSNGGSNETKAVETSASETAAESAVSEGDGEKTLKAGATTGFFGAESLDPANNWDGWIMSIYGISENLFRLDDNLAPQPWLVDSYENTDDTTWVFTLKDGITFSNGNAVTAEAVKKCFERTYSNNTRAASTLKIDSMEADGQILTIHTPEANPTILNDLCDPMFGVYDAESEIDPELGASCTGPYVATAFTAMTEVKMDKNSNYWGGEPAIDHIELKIMDDVDALNMALQNGEIDMIAQLPAASASLFSDTDTYTIGAATSTRSQFLQFNLESEALKDVNIRKAISMCIDREGYADVVFAGYAKPSYGIYPDTLSYGGTDGINLSVDKYDTEAAKALVEAAGYTPEKPLELKLVTYSYNTGLLQMTDMLQPELEAIGIKLSIETYDVLDDVLQAGNFDIAALSYALAPTGNAQYLINMLFVSDGTDNYGHYSNSDVDADAQKLETTFDTSERDAIVKDLTQKVVDDCPDAFIASQQLLIVYNNKVTGVDVNPSEYYLITNTLDIAEMKKKKMIKFRLIILMVLCAGLLLGAWIVRGHLIHEPFRTNVRQAFQAPCREYIFGTDNLGRCVACRILYGAATSLYAAVLAVLAVFIIGTAVGVTAAYAGGIVDRILMKITLVFQAFPNFILAVAVAGMLGTGLKNSVLALGAVYWITYAKLSRSLVLSIRDSEYIRAAKICGAGPTAIIFKYILPNMVSPLIVTAALDVSSFILSMAGLSFLGLGPSRPTAEWGATMSEAKTFIQQAPWCIVFPGLALLVTVVIFNLLGDALRDVIDEGMIIGITFLSFLLSYLSPGDPAQILLNNQGVKASEEALQSTRHELGLDRPMIVQYGDWLMDLCKGDMGTSYKSNRPVLSEMTAKIPGTLILTVTALGVTMLLSIPLGTWCAWYAGGKADRLIQMVTYLFASLPSFFLALLLMYFLSLKIKLFPVIGSLSLKGLVMPVLTLALTLSAWYIRQVRAIIRKEMQGSYIDGLRARGMSERQILFGHVLRNCRGPLVTLIGISFGSMLGGTTIVESIFSWPGVGKLAVDAITARDYPVIQSYVVWMAVIYLSINYLIEFLYPLLDPRTGRRRQKMKKDELLKNIEKYWTNRAEGYSQVNLEELAGEKWPVWLSVIEEHMPKVERKRIRILDIGTGPGFFSIILSRAGYQVTAIDYTEEMLKKAKNNAGILADKIEWYQMDAQALRFADNTFDMIVSRNVTWNLEHPDRAYYEWMRVLKPGGVLLNFDANWYHHLFDEEKRAAYEADRNKVSSLGMHDDYTCTDIEAMEAIARQVPLSHIQRPEWDRQILKQLNGIQIQLDEKVWQRVWCEAEKVNNGSTPMFMVACTKAPVQQTERLRLQAAMVMRRHTRIMLFMLLVMLLALTGCEKIYTGNADTQTSSDSEELTETVQETETNPETVRESVESDKVTEGSTQNKKVFESSLGYSVIYDDTVFEYNRTGDYDEIGLRGQTFSSKPVFFAAMKIKNEDIQTVMDQIFNNSVQQTTIGVKAYSAVCQPTTEEVDGGKNLKYHNQYLVELANGDALLFEVQWFEENKNFRETEATGESEDTAETENVRETEETVKDTEAAAESSKEVVAESASKKLSEMLDSIEIEVSVKGEEPAEALETVLESGTETQQTEETAKMKKLVAVTTTILIILIAVLGVFMIKGHGSDSSTAKSTLSDRKESLSDKEDTKAAEASKDSDADWVYDGELLRMNKQMKTITYEGRDFKVKFTNPFYEEGSDNYISVIFYDKVHGYLLKSLGEGTDSAFYEAYKTEDGCETWNKCTADVWFDLNGSNHLEMISENEIVYVCSVVNENLGTNETTISYSADGGDSWQAFKSNSGGDSEAIKAIIDKMTLEQKVAQLFVVSPETLTGVDSVQYAGDMTYQALQDYPVGGIVFAKDNIDSSSQFGTMTDNLQSYSEEISGLPLFLAAAEEGGSASVLGNNDNLDEYYENSYSDDDSDYSSSSANSVHSGAPSMSEIGRKDDSTNAYEAGKSIGSLMSAYGLNLDLAPVADVLSGNSTGIGNRTFGTDAQTVSDMALEVIRGIQEEDVNAAMKYFPGYGAASSNMSGFPVINSSLDELKKKEFLPYSNAIAQGMDFVMVGHISVPNVTGDDTPASLSEKMISEVLRKDLGFKGIVMTDYLNDKTIVKNYGAADAAVKAIQAGADLLLEPDDLEAAYEGVLKAVKKGDITEDRLDESIYRILRVKLSMQDESSDTTESESVSDYMQHNYWIYLFIMFAVTYLVRVLPLVVFKKKITNRFVRSFLTYIPYAVLAAMTFPAVFFAVDCIPAAAAGVVAGVIAALAGGSLFTVAISASAVVYVLLLILMNLMAFKRGLRDGIAIAIGYFSVSFSFGLTAVASGISWWEAVLISLTNLTSSGQFAGIGIIAASGSYVEMMVTELVINMRYALMSISLSQKLDPTFKRWQQLILGHCNTDEIFAVAMSRNKTVTPAYMTGLAVLPYIGWTGGTLVGAICGNILPTTLSNALGIMIYGMFLAIIIPAMRKEHPILVVVCVAVLLSCIIHFVPVFSFITDGFSIIICAVAASAVGALLYPVSEEEEAEHAAMTLQQLKYVIAIAEKGSINEAAKVLYISQPSLTNAMHDLENDLGIQLFIRNNKGIRVTNKGEEFLRYARQVIEQVVLLEDKYLNKEPEKQYFHISAQHYNFAVRAFIDLVQEYGPDEYDLALSEKKTYDIIEDVKNGRSELGILYLADFNKKVIMRTLKEYNLTFTEMYTTKPYIFISARHPLADRDLIRMEDLEPYPYIYFEQGESNSFYFAEEVLSTFQHKKSIRVTDRATCFNLILGLNGYTPSAGIYIEELGGGDLICKPLALDETIHIGAIAMKDSVRSEIGRKYLEFLKKYLIEMLKNWKVQEIGGAVALLICGLVLLLMPELTLVTIANVIGILVIIIGAFFLIGYFLRKELAAGNNDLIKGLVIVCIGIFICVKSELVVSVLPVVLGIGVVLSGILKLQHAFDLKRMGFDTWVRIGLTSAVNIFIGLIVILNPFSTVAWLMRLVGIGFLFSGVTDLITTIYVSKKASEYYVDGKAEETDEEIKMKEEFKKYLAMILAVFCTAALSILFFFILFRMDALQSLIGKILNILMPFIYGAGIAYVLKPLCNTYERFLNKHWHPKRQKLIVTVSVIGSIVTGLVVIYAVLAMLLPQLALSVARIARSLPEMIESISHMVDHLFEGNEVIQNYIMQLSDAGTESLSGWLKESILPYMNMILTGLSDSMINMAGIFMDLFIGLVVAIYLLYGRRKFKKQGKLLLYSLFKERWADKIIEEIRFADRVFSGFIGGKLLDSAIIGGICYIGMMIMGLPYAILISVIVGVTNIIPFFGPYIGAIPSAIILLTVSPMSCLMFVIFIVILQQVDGNIIGPKILGSSTGLSGIWVLFSILLFGGLFGFVGMIIGVPVFAVIYDLIRQLIIRGLELRSKSKMFDDYQQEYPRKEMSKRCAFSGHRPFYFPWKENESDPACIHLKATLEAEINKAVADGFFYFIVGGADGVDTWAAEIVLEKKKTNPKINLELAKPFADYNKHLQNDYGRRLRAIEEAADRVTVVSDGADEAADYILRDCYMVDASERMIIVYDDDSKGPSGTKDALLYARSSGVEIRQIQWMHLMQYEGTVYRPPSEARSLIVQVTVGCAHNTCTFCTMYKDKKFKIRPLADILADFDEAAMLYGGHIRRIFLADGDALIVKTEMLIQILTYIWEKFPNLERVTAYGTTQDILHKSEEELMQLKAAGLDMVYMGIESGDPQVLKDVKKGVTREEMIEAGRKLKRCGIFCSATLISGLGGRQRLREHAIASASLISAIKPDYVGFLTLMIDPQAPVYSKIVSGELELLNPEDVVEEMKLFLQNVDSEGTVFRSNHASNYVILKGTLNEDIPSMLAYLRQVEEQGKYREERWRRFMNRILNRQAFFADGTPFYRLYTSDGTGYGVRLRFRTAKDNAELVTVVTDSMKADMHKCFTEGRFDYYEVMLHYPECGTNYYFTVTGAETDEGKRTAVYNKRGVMDGVQDYYNFNFYPEFKTPDWAKGAVFYQIFTDRFCNGDPTNDVLDREYSYVKLHSEQEKDWQAYPHDMDVCHFYGGDLQGIMHKLDYLQDLGIEVLYLNPIFVSPSNHKYDIQDYDYIDPHFGRIVDDAGEVLRKSDMDNCHASRYIRRVTNKKNLEASNELFVQFVEEVHRRGMKVILDGVFNHCGSFNKWMDRERIYEGQEGYAPGAYVDEKSPYRSFFKFHSEKWPYNKDYDGWWGHDTLPKLNYEESESLCEYILRIGQKWVSPPYNVDGWRLDVAADLGYSPEYNHLFWKRFRKAVKEANPNALILAENYTDPASWLEGDEWDTVMNYEAFMEPITWFLTGVEKHSDERRDDLLCNPETFEGAMSHHMSRFEYDSLYVAMNELSNHDHSRFLTRTNGQVGRIQSKGAKAAEEGIHDAVMREAVIMQMTWPGAPTVYYGDEAGVCGWTDPDNRRTYPWGHEDKQMLQFHKEAIRIHKSSTALRTGSYKMLYTAWGILGYGRFDKNERYAVIVNNTQETVNVAVPVWQIGVADGSRMEQQLMSVAESFTKVPDIYVVTDGYLMVAMPRTSAVILKDIGMAIWMKTKFDRGMNMDIPHSPNIACAMYGFRELGAEIIPYHSLDEIYDKVQREDIVLDYILQCNEIFKKFGVEPYVPDYPEKLTKYLGRKIWEDTIDSISRDEKKWSAGVFVKPKKNKVFTGKVISDIYDLVGCGNHSENYEVICSEALKINAEWRCFIMYDKLVDVRPYGLILDPSRESYFYHYDEKVLKEIMNAFRTWEGRPAACSMDICVTDDGRTLLVEFNDAYSLGCYGLNDIQYAKFISARWSQLLNREDEYKFFMLFKEMMEDERAAGHAEGMAAGRAEGNSVGIISSILTILSSKGKVDASLQEFVSNQKDEKILKQWFTMAASADSVAEFESIWAELMNLNIFDRYLLIINIIALVIYGIKVLVYKHQTRDWFEKLCMFIVLLGGSAGILLMIILFDRKAVKENMMSRVFTLCMLVIQAILLLIVKGYHGDQIHIDFWDYLMQHRILLIYLAVVNILTIIVFGVDKMNAKSNRQRVRIVTLLGLAFIGGSVGALIGMYGFHHKTKKAYFTVGVPLILLMQVVVLFYVMNMGIFFGEVSMGRFVNPDNSAFQVALNSRIYVDKTGLIACMNNILDSTDAYICNSRPRRFGKSYAANMLAAYYSKGASSEEMFSKLDIGKTPDFKRHLNKYDVIHIDIQWFLTNCDDKDKVVGYITKIVLDELKDVYPDILPSEVLSLPDALSRVRNKTGQKFVIIIDEWDVLIRDEAANKKVQDDYIRFLRSMFKGIEPTKYIQLAYLTGILPIKKERTQSALNNFREYSMLNAGPLASYIGFTENEVKELCRVYNKDFTEVKRWYDGYQLGAYQVYNPNAVVNTMIDGNFQSYWSATASYDSIVPLINMDFDGLKTSIIEMLSGASVDVDVASFQNDISNIVNKDDVLTYLIHMGYLAYSADSKMAFVPNEEIRQELLRATRRKQWNELMVFQRESERLLDATLDMDGTSVAEQIEKIHEEYVSAIQYNNENSLSSVLAVAYLSAMQYYFKPVRELPTGRGFADFVFIPKPEYKNDYPALIVELKWNKSAKSALQQIKDKKYPNAIKNYTGAILLVGINYNKENKKHECMIEKMHIMKYTNVTEGEFVVRNNRFTAEVLIGGVQETIHVKNTGRMKELLFPGARVTLTCSDNPNRKTKYDLISVYKESLGWVNIDSQAPNKVVGEWLAGRDYTFIKPEYKYGDSRLDFYMEKKDEKYLMEVKGCTLEIDGIGYFPDAPSERAVRHLHELMHAVKQGYHCILAFVIAMPGVTVVRPNMTTHPAFGQALSEAMAAGVEVWYLPCEITADSIQIKGRKRKYYSVQDRLYPHVVIQMQPIYLSIQQEETGAQIRKLMMKNGYTVRDVQGAMGFENPQAIYKWISGKSLPSLDNFLILSRLLHASIEDILVVDGDIVMSALFETIEDAVSESGELAYVISLLKGFYMRIENLQNDNRKFIKSIGNFHVLEYMQDASVSPMNAMNEYFMSKMNVRRRQVVIDIDKNHSAIIQAGAMQWMGGHVEATSGVKGIGDLFGKAIKGAVTKETAVKPEYVGEGCLVLEPTYKYIILVDMAKWGATGMTIEDGMFLACDANVKNKVVARKNISSAVLGGEGLFNLSLQGDGVAALESNVPEEELIEVVLENDELKIDGNLAVCWSSNLDFTVERTTKTLVGSAVSGEGLVNVYRGTGRVLMCPVAPTSSLFEAANTMSAKAAAKNSNTFGKMPKGTNQKFKLYRLAQIMMKKTDEEHYITMPEIKEALAEYDITADRKSLYNDLRDLEILGIEVEGEQDGNRYRYHVVNRPFELPELKLLVDAIQSSKFITEKKSNSLIKKLETMVSEYDAQKLQRQVYVSGRIKAMNESIYYTVDAIHNAISENKKIRFQYFQWNVKKEPQLRHGGAWYHISPWGLSWDDENYYLVGFDSEAGLIKHFRVDKMLRIALSNETREGREHFKKLDMADYARKSFGMFGGEEETVKLQVSNGLAGVIIDRFGKDVMMIPVDEDHFNVSVDVRVSRQFLGWVFSLGESVRILGPEAVVDQMKAETQRLIGQYDIKMNRNKQMHAPVYEALERLKRRRVVPFDVPGHKRGRGNPELVELLGEKCVSLDVNSMKPLDNLCHPVSVIKEAEELAAEAFRAAHAFFMVGGTTSSVQSMVLSCCKAGDKIILPRNVHKSVINALVLCGAIPVYVNPEVDNKLGISLGMQVAEVEKAIKENPEAVAVLVNNPTYYGICSDLRTIVQVAHAHKMLVLVDEAHGTHLYFGENLPVCAMDAGADMASVSMHKSGGSLTQSSLLLTGKNVNWEYVSQIINLTQTTSASYLLISSLDISRRNLALRGKESFEKVSRMAEYAREEINSIGGFYAYGKDMINGGSIYDFDVTKLSVYTRDIGLAGIEVYDLLRDEYDIQIELGDIANILAYISIGDRIQDIERLVGALADIKRLYAKNPEQMPNAEYIKPTVCVSPQTAFYGEKKSVPIRETEGMICSEFVMCYPPGIPILAPGEMITREIIDYIIYAKEKGCSMQGMQDPAVESLFVLTGKYMELWFSDYHTEKVKVSVKVQKQLFGLQTEFQRIDVFDSDEFGRFLSADGSIVFSEKDEFIYDEMIVHVPMAVHPHVKNVLVIGGGDGGVARELGYYEEIEKIDVVEPDRVFVEVCKEFFPDNACGLGDKRVSIYYEDGLKFLRLKQNEYDLIINDAIDPLGHNAGLFTKEFYGNCYRALKEDGIMVYQHGSPFYDEDEESCRVMHRKASHSFPISRVYQAHIPTCSSGYWLFGFASKKYHPLEHLDAKRWKERHIKTWYYTTNLHKGAFMLPRYVEDMLEEEEDRKKMGRLLIIGCGGVAGVAIHKCCQNSKTFSEICIASRTKSKCDDLKEKLEKTTETKITTAQVDADNVDELIALIKDYQPDAVLNVALPYQDLTIMDACLACKVDYIDTANYEPEDTDDPQWRAIYEKRCKDEGFTAYFDYSWQWAYQERFKEAGITALLGSGFDPGVTSVFTAYALKHYFDEIDTIDILDCNGGDHGYPFATNFNPEINLREVSANGSYWENGHWVETEPMEIKREYDFPQVGQKDMYLLHHEEIESLAKNVPGVKRIRFFMTFGQSYLTHMKCLENVGMLSTSPIMYEGREIVPIQFLKALLPDPASLGPRTVGKTNIGCIFTGKKDGKEKTIYIYNVCDHQECYKEVGSQAISYTTGVPAMIGAALVLDKVWDKDGVFNIEEFDPDPFMDMLNQYGLPWVVDENPQTVEMMFEGLPTPCYVVDEGRIRHNLEILQQLEKDTGCHVLLAQKAFSMYRLYPMIGRYISGTTASGLYEARLGYEEMGKENHVFAPAYKEADMQELVTICDHIIFNSFAQYEKYKDICQAKGVSVGIRVNPQCSTQEGHEIYDPCGYASRLGVTKAQFPEVLPEGIEGLHFHTLCEQNADDLVTTFQAFEEKFGKYLHCIKWLNLGGGHHITRKDYQYETLVKLIRYIRDTYHVTVYLEPGEAVALNAGYMVTEVMDIVHNDMDILILDVSAACHMPDVLEMPYRPPLSGGYEANQKPYTYRLSSMTCLAGDVIGDYSFEKPVQIGDRLVFEDMAIYSMVKNNTFNGMPLPGIALLRENGNTEMVRKFGYQDFKMRLMKNIKTIPSADGYHMPAEYACHKGCILIWPQRPGSWKKNPEAAEKAFCAVMQAIAESEAVYLACGKAALPRAKAFADEYNRQFQREISEKKHFPVVVFEAETDDAWARDIGPTFVVKDDTVRGISWTFNAWGGEEDGLYASWQKDDAFAAAFAKREGYVCYDASPFVLEGGSIHSDGEGTVMVTESCLLSRGRNPQLSKAEIEEKLQQFLGAEKVLWLPRGIYNDETNEHVDNVCAFIRPGEVVLAWTDREDDPQYPLSLACLRYLESQTDARGRRIKVHKLPIPDVPVCVTKEDLEGYAFEDGEDTREEGERLAASYVNFYFSNGAVVMPAFGGENIKSDQRAAEIMEKLCPERKVITVDARDILTGGGNIHCITQQIPFGKAEQGEMRNVKIAAIQMQCSTNLQTNLEKAEKMVRQAAGDGAQIILLPELFEREYFCQQRRYDFYHLAKPVEENDAVQMGMRLAKELNVVLPISFYEQDINTLYNSIACIDADGTLSGVYRKTHIPDDHYYQEKFYFTPGNTGFKVFDTRYGKIGIGICWDQWFPETARCMALMGAEILLYPTAIGSEPILECDSMPHWRRCMQGHAAANLMPVIAANRIGREEVTPSPENGGQRSALVFYGSSFMTDETGGLKACASRDQEEILTGVYDLDDLADKRLEWGLFRDRRPEMYIKITQMNELYEAIEKKIKASGYPRAISGADVYDDICDQIEGKENGEYILLSKFDEDVVFEYHITIQDENFNLGILTMKTPEGVYQADFDEEMRIVVSACLLGENCKYSGGNNENKAVLNFVKDHELIPVCPEVLGGLPVPRMPAEIVNGVVRCRDGRSVDDAFRSGAAKALTIALKEKADLAILQSRSPSCGVKAVYDGTFSGKIIPGEGVFAELLRENGIRAIDAADIDAMAFDFNEQFEKMMREYDVTEVVLLGHMNPDGDAAGSVMGLAHYIKVNYPQYTAWPFLSDKLDKGPKKQVMEDEIFAPFERPKLASERYAVIVCDTATLKRLIGMKYYQRAVVSMIIDHHASNEGYGIINDIKVSESCAYNVFEILDKEMLKKAASAPHPNGADYLYMGILHDTSRFSRSDAEIEAAGSKLLAMGADHRYVMRTMQDKTLDDLIRQGEILRRVKRVMEGKVAYVYMSYQEAKKLHISYEDIHPISGMLRDCEDIEMGVSMYEEAPNIWRCSFRSDGQWINVNEMMKSFGGGGHAAAAGLRRETDQPEVLLEQLLAQIESIQSLGMPHRSGILFLSVYSLCIASSFRFSLQNTLNNYHIVLFFMNIFEKRESVVRSYCRKYPVVFKKALNAEMFSEDGERYVDFLAVAGSMNYGHNNPEIKKAVLDYLADDNIINALDMYTSAKEEFLTEFERLILSPRKLDYKVMCCGPTGTNAVEAALKLARKNKKRTNVIAFAGAFHGMSLGSLALTTDKTSREGGSVPLTNVSFVPYDGTFDSLAYLRWVLEDDHSGVDKPAAIILETVQAEGGINPASVEWLRGIRQICDENDILMIVDDIQVGNGRAGYFFSFERAGIVPDMVVMSKSISGFGMPMALLLIKPELDIFRPAEHNGTFRGNQLSFIGGTAGIRYFTEHKLDEEVRRKGQIIDQFIQKEILPMDARLVHRGIGMIWGIDFNGITPEKAIEVIHKAFDNHLILEVAGRHDGVVKIMPPLTIEDDTLMEGLQIVKKSIAEVLNMPLIGDHAPEFHAMTTQGKIDFPADYKGSWVVLFSHPADFTPVCTTEFIALSRMNETFESLNTKLIGLSIDSLHSHLGWIKSIEALNFNNEGKVKIPFPIIADISMNVARKYGMLQTVANTQTVRAVFIIDPEGMIRTILYYPMSTGRNIPEIIRILQSLQLNDKTHYSTPANWQPGDAVVMGAPLTIEEAQERLESSDNTIEHLDWYLTMKKMKMKFFHLSDLHIGLKLMNRDLREEQMDILRQVTDLAREEQPDAVVIAGDIYDKAVPAAEAVEVFDSFITELKRAVPEAEMMLISGNHDSGLRLNCFREILDEQKVHMIGLPPRREEEYIEKVTLQDEFGPVNFYLLPFVKPSMVKQIVGVDENGNNLSYDATLHKLIAREEVNTAERNVLVSHQFYLPVGENAESVERMDSEIRTVGNIDAVASDVLEAFDYAALGHIHKPMKVGSELYRYCGTPLACSVSEAGQQKGVIMVEIGEKDSKASVKITVLPLKPLREVRIIKGSLEEVLVQACEDFVTVILTDRVDLDIMDMQDRIRMAFPYLLEIRREVLRKADYSEQLMAEKEQDPFELCCSFLKDLDDEEKTILRDVIHTVQGVKMKPIQLTMQAFGSYGKKTVIDFTKPDQNLFLITGDTGSGKTTIFDAIVFALYGEASSVVNRKNGAELQSQFAAASVEPFVELVFSEKEGSEDVHYTVRRVPKHVRPLKRGTGLKEESGSVSLIMSDGTEYPSKETDKKLEEIVGLTKNQFMQVAMIAQGEFMALLRAKSDDKKVIFRKLFNTELYQNIVDELAKRRKDKDRKIAQIKTACQTEVGHILVPKLVTADGAETDQEQNGAANQIADECRDANKLQELKERILKSERLSLPDMEALLQTLVSVSEWTKDKVQQSESETSQLYKVYLLKRDAVTKAGQLLERYKELEEAEKELGECEAIKPLMQEWQQCMRQIEDAYDILTLWKQYQEVSGQLETARQALAANEQALPEQKMACEQAAVQLQQAKKVQEQALMDFSEVKTHVENDLEAFSKMAEAKRKVLTAQTKVDEAGKQARIAEESLSDLESNEKQWQTQAELLSDTDSRMIILQGKQRDIKGIGADFKSWKDEEKDCFSQQRCAEEADKVYADAKDRFNKENTAYIQAYNDFLDAQAGFLAEKLQRGEPCPVCGSTIHPHPHQAEKSALTKEELNILSESVRELQEGQAAAAKKAGEAKAMLDAKEKNCIQIWEKLRQKVIAYSRDEMGELDSEEIQGLIETWKKALKDEEKQLQKDKKQLQQLKKWLTKAAKDKEELTAQKNKADKMLADTKAELAAAQAELKSTFISTYYKSEEEANQFMEQAEQRKKNAEKQYHSCDKVDKKVRSDKEKTELEIAQHRRDIPNLQDKSDKRKAVYTQLMEEKQLTEPQWKCVTESYDKADRQQFEEKIRQYQSKLSAASKQKAVAEKAIDGRVKPDMEQLCSERNVAEAAWKKEQALYERYAEMYKTNHRVCEALMPKMAERSKIMEEHRRLDDLYNLLAGKVTGARMDIETYVQRYYLERILYAANRRFGEMSAGQFELRMCDITKAGEGRNRGLDLMVYSNVTGKEREVRTLSGGESFMAALSLALGMADQIQQSSSAIHLDMMFIDEGFGSLDSQSRDQAVRVLQQMAGGSKLIGIISHVSELKQEIEDQLIVSKDEEGSSARWQISMDAGIKETKEQALKEMELFKTVFDGVRLLNMHALELIGKGLGSYSLTESEQKFDFWEKEHPCDNDSCIVLQALRDKDVHTKLEYIGSQLYEVTARYMEVEGEPYVLELVKRMDDNYMIDEKQREKLLRHFGGYHEQLYKDALTGAYNRRYFEEKIRKSTVSAGVAMIDLDDFKLYNDSFGHDTGDVVLITFVNIIKNCTRKTDMLIRYGGDEFLLIMPGIKEQDFKNKLLQILEEVRRADVPGHGGLRLSASIGGVLSNGSVIEDAIGRADKLMYQAKNRKNMVVTEDNLVADGIKKGMLHDREKIRQLILIVDDSELNRALLSEMLKDDFRILEASNGRECLDALEQYGMGISLVLLDINMPVMDGFEVLVQMNRNHWIEDIPVVMISSDDTASNIKQAYDMGVSDYIRRPFDAQVVFRRVVNTIKLYAKQRRLITLVTDQIDEKEKNNQIMIRILSQIVEFRNGESGLHVEHINILTGLLLERLVQKTDHYDLTWSDQYRITLASALHDIGKIGIDDKILNKPGRLTKEEFEIMKSHTLIGASILENLGAYQEEPLLKAAYKICRWHHERYDGKGYPDGLRGDEIPISAQVVSVADVYDALVSERVYKKAISHEKAIEMILNGECGVFNPILMECLVDIKDKIHKESQLEVLRMTLKEAYESVESNYDNVLKRLGSEGMIKRFAVKFIDDPTFGELKNALAAGDGESAFAQPKSELSKFINAYKSASSRLLKKEYPQIRERLWKEAFWSQSFCLLTAGGAPIDVIRSYIGTVTSDLPLTEVTVGVYDTSGNLKTGRTVDPNTTSYDLRNVDTSVKFGSLGTGGYRYKVMYTALIAFIWYEGDEEEKNLNTLLDLLNESETREEDETYQNPVDMMFQELEERDPQHFAVRQYKKYKMAAGKTAKSILISCGARLAPFDIAELREIMSYDEMELDKIGDRKTALFLIMSDTDTTFNFVIAMLQSQLFNLLCDKADDEYGGRLPVHVRVIADEFANIGQIPQFDKLIATIRSREISASIILQSQSQLKAMYKDSADTILGNCDTTLFLGGKEKTTLKEMSELLGKETIDLYNTSETRSNQKSFGLNYQKTGKQLMTEDEIAVMDGGKCILQIRGARPFFSDKYDITKHKNYRLLADENEKNRYKVEKELNPQYTPKSEEEVEVIHVELSEMTPVIEEPLLGYHPCDARFLTSCREPAGGQCQMMDRHIKAPLNDDEVKMLKAGDYVYISGTIYTARDAAHKRMYEALQNGQEVPMPLKNNIVYYMGPSPAREGRPIGSAGPTTSSRMDKYAPLLMDQGLKGMIGKGKRSAEVREAIVRNGAVYFAAVGGAGALLSKAVKKAEVIAYDDLGTEAIRKLEVENLPAIVVIDSEGSYLYEDVAKKYRKIMREISCNAIISSIKEMCIQATHYLSDDMKSALYKGVEKEESPLGRQILEQLCENLTIAGEDMIPICQDTGMAVVFVEIGQEVHIMDGGLEDAINEGVRQGYVEGYLRKSVVSDPIERVNTQDNTPAIIHYSIVPGDRFRITLAPKGFGSENMSRVVMLKPADGIEGVKKVILETVDLAGPNACPPMVIGVGVGGDFEKCAIMAKHALTRAAGEHSSVPYVRALEEEMLDKVNRLGIGPGGLGGTVTAFAVNIETYPTHIAGLPVAVNICCHVNRHVTKELMNFKDHIEHLKTFFTPSVKNVILLIRWLITAVFTGLLVGAVGTLFYYAMSFVTGCRTAHPILIYLLPFAGLLIIFLYRVSGQYNNTGTNLVLSSIQSDNHISVKVAPLILVSTLITHLFGGSAGREGAALQIGGSLGDFLAQTFHFDEKDKKLMIMCGMSACFSAVFGTPMAAAVFSMEVISVGIMHYSALVPCVISSLTASMLARHFGAMPEVFPITDLPALTALTVGQIILAAAAFAAISVVFCIALHLSEHTYKKYIANPYLRVFVGGLIVVLLTLLLHTNDYNGAGMPMIARCFEGSVPPWAFMMKIIFTAATLGAGFKGGEIVPSFFIGATLGCVIGPILGLPAALCAGCGMVGVFCGVTNSPITSLLISFELFGFEGMPYYLITIAVSYMLSGYYGLYSSQKIIYSKTRTEYIDAHTHMDDKIFDKIHEVDLKERMETFYIDYAMSVIASRALPDVRDGLKPVQRRILYAMIELNNGPDKPHRKCARIVGDAMGKYHPHGDSSIYGALVNMAQDWSTRYPLVDGHGNFGSMDGDGAAAMRYTEARLSKISMEMMADINKDTVDFQPNFDETEKEPVVLPSRYPNLLVNGTTGIAVGMATNIPPHNLRETIDGVIKIIDNRVEENRETTIEELMEIIKGPDFPTGAMILGKNGINQAYRTGRGKLKVRAVTDIETMPNGRHRIVATELPYMVNKAKLIEKIAELVKDKRIEGISDLRDESSREGLRVVIELKKDANPNVVLNQLYKHTQLQDTYGVIMLALVNNQPMILNLKQMLELYLKHQEEVVTRRTRFELNKAEERAHILQGLLIALDHIDEVISIIRSSKNVAEAKTRLMETFGLTEVQAQAIVDMRLRALTGLEREKIENEYNELMKRIGELKAILADEKLLLGVIREEIKLIRDKYGDDRKTSLGVDDDEITVEDLIKRENTVIAMTQLGYIKRMTMDNFRSQNRGGRGIKGMTKLDEDCITELMMANTHDYILFFTNKGRVFRLKGYEIPEASRIARGTALINLLQLEPGEKVTATIPLEKYENDKYLFMATKNGMVKKTSIMEYINVRKTGLLAIGLREDDELIEVKVTDESDLIYLVSQKGMSICFKQDNVRATGRTSMGVIGMDLDADDLIVGMQVSSQGEAVLIVSEKGLGKRTMLEEFNVQNRGGKGLKCYKITDKTGLVVGVKCVNAEDELMIITTGGIIIRMPVEGISILKRITSGVKLIQLDEGSVVASIAKIREDMKDDEETSDEQSEEAGMIEEVLETDSVDNSEENETEMSEGYGASQIQILEGLEAVRKRPGMYIGSTSAKGLHHLVYEIVDNSVDEALAGYCDHIEVTINKDNSITVVDNGRGIPVGIQAKAHKPAVEVVFTILHAGGKFGGGGYKVSGGLHGVGASVVNALSEWLEVNVYVDGYEYYQRYERGKVMCELQKIGPTEKRGTTVHFLPDKEIFEETVFDYKVLKQRLREIAFLTKGLRISLTDVREEEPILSSFHYEGGIREYVAYLNKANTPLYDEIIYCEGEKDGVLVEVALQHNDGYNENVYSFVNNITTPEGGTHLVGMRSALTKTFNDYARKNKLLKDNEQSLTGEDIREGLTAIVSIKIGEPQFEGQTKQKLGNSEARGAVESIVSDKLSVFLEQNPAIGKLIVEKSVMAQRARDAARKARDLTRRKGALDSMSLPGKLADCSDKDPAKCEIYIVEGDSAGGSAKTARSRATQAILPLRGKILNVEKARLDKILVNNEIKAMITAFGTGIHEDFDITKLRYHKIIIMTDADVDGAHISTLLLTFLYRFMPDLIREGYVYLAKPPLYKIERNKKEWYAYSDDELNAILTEIGRDQNNKIQRYKGLGEMDAEQLWETTMDPERRILMRVSMDDAEKVSIDETFSVLMGDKVEPRREFIEKNAKYVRNLDIMYVESLALENYRNYAHLSVNLSPGINIFFGDNAQGKTNVLEALYMCATTKSHRGSRDREIIRFGEEEAHIRMLLSKEHVRHKIDVHLKKNKSKGIAIDGIPIRKSGELFGLVHMICFSPEDLAMIKNGPGERRRFLDLELCQLDKVYLHNISNYNKIVNQRNNLLKQIGFDSALKDTLDIWDMQMVNYGRKVIETRRLFIAQLNEWLEQIHGRLTGNREKLRLVYQPSTEPEDFERVLLSKRDQDIRMKMSGTGPHRDDFLFMVGEVDIRKFGSQGQQRTAALSLKLAEIELVRQSIGDEPVLLLDDVLSELDSSRQNYLLDCIKDIQTVITCTGLDEFVNHRFNIDRIFKVTDGTVDFVNEVVGMQTFGLKDEHIKLGQLLKATGLVGSGVDAKIVVQEGLVKVNGKVCYMRGKKIVSGDIVEFENEKIEVVMKIICNKSALLTGVNTVLKAVPARTTMPILECILIDTTSGVIKLTANDMDLGIETTVDGDVLDKGCIALEAKLFSEIVRKLPDSEVTIETDDNNKALIKCEKAKFNIAGKDGEDFVALPEIEKTHFITLSQFSLKEIIRQTIFSISDNESNRMMSGELLQIDQDQLRLVSLDGQRISIRKISLKESYDPIKAVIPGKTLNEISKILSGDMDDDVRIYFTDRHVLFEFDQTVVVSRLLEGEYFQIDKMISSDYNTKITINKKELQGCIERASLLIRESERKPIIINVTDGSMEMKIQSAMGSMNEDIDISKEGRDIMIGFNPKFILDALRVIDDEEITMYLVNPKAPFIIKNDEQSYIYLVLPISFNMMINKIRENWDQILDIMRIEHDISPVAFNTWIKPLTVYSVEGHTITILVNNELEQMCSYIKKKFEQPLKVTISEYFNDVYDIHITTSEELGKIEATQTVEPEKKPAASIITNKTLNPNYTFDTFVVGKNNELAHATALAVASDPGDYGNPLFIYGGVGLGKTHLMHSIAHYILSYNPDYKIIYTTTETFSNELISAIKNKTQEAFKDKYRNIDMLLIDDIQFIAGKDSTMEEFFHTFNTLYENKKQIVISSDKPPKDIVGVEDRLISRFKVGLTVDVQPPDYETRVAILVKRAELEHINIEVDALHYVADHISSNIRELEGALRQIYNFSRLKHADRIDTDLAREALKDIIAPDEARPITPEVIIETVTEHYNYKVTKDDILGKNRSRDISYPRQICMYLCEKYTGLSLAAIGAALGNKDHTTVLHGIKKIKTDLEKDEQLRSTIDIITKKLNPPKMKMTFQPKTRQRSKVHGFRKRMSTANGRKVLAARRAKGRKVLSAMEYSESLKKNRDFKTVYGNGKSRANKYLVMYVMKNGTEKNRIGISVSKKVGNSVVRHHLTRLIREIYRLNEHHFKKGLDIIFIVRVNAKKTDYHTLEKALMHVADIHRVLEKSRNEQNEMSKMSRILIAMIRFYRKYISPMKRGCCIYIPTCSQYAIEAIMKYGAVKGSYLAARRILRCHPFAKGGYDPVPMSILVLTQTGGILKPFAIILGFIMNYIYRFLQIFGINNVALTIILFTLVINVLMIPLTVKQQKFSKMSSLMNPELQKVQKKYQNRKDEKSMRMMQAETQAIYDKYGASPTGGCLPMLIQLPILFALYRVIYNVPAYVEPVREIYEHIAQPIMSASGAGDIMTTLIKEMSLRVSNFDISNINKIIDALYVVKSTGWSAVSDAFSGSADVVSAISQYSTEIIHINSIPGGLNIADAPVALGHGISGIFPGIIIPALAGLSQWANLKVSQRNQPKPDLDSTMGSTMNTMNLMMPFMSVFFCITLPSGMGIYWIASAVFRTIIYLFIDKFFNNKSVDDIIEANKEKAAKKAEKRGEQNAKLEEYAAMKTKNIDRRSISQIANAGKGNGDAKAEKKSESSNAGGKSSKKVDKNNAEADKKSISGYAHMLNRHDDMEYIEVSAKTVEDAISEAAIKLEVPSDKIEYEVITEGSTGFLGLIGSKPAVIKARKKFNLLDHTKDFLARLFKAMNVDVNSTVDYDEESRTMNIVFDGEDMGLLIGKRGQTLDSLQYIISLVVNKESDSYIRIKVDTENYRERRKATLENLAKNLAYKVKRTRRPVSLEPMNPYERRVIHSVLQNDRYVETHSEGEEPYRKVVITLKKDYRERSPRSGYNREGRYNRENNYNRERGYRRERSYSREEVERPAENNEHNDSNDNVMQSDTIAAISTGMTNAGIGKVRLSGDDAVTIVDRIYRSPGGRKRLSDVSTHTIHYGYIYDGDCLIDEVMVLIMRGPNSYTREDVVEIDCHGGVVVMKKLLETVLKYGARLAEPGEFTKRAFLNGRIDLSQAEAVIDVINAKSDMALESSLNQLRGSVKKRIEKLRKGIIGNIAFIEAALDDPEHIQAEGFGDELAVQVRGYMAELQKMLDSADNGRLVKEGIKTVILGKPNAGKSSLMNVLLGENRAIVTEIAGTTRDTLEEHVSIHGIPLNIIDTAGIRQTEDVVEKIGVRKAIDFAEEADLIIYVVDSSTEMDQNDDDIIRMIQSKKVIVLMNKSDLRPVVSRSDIEKQLQAPIIEISAREETGLDIFEDTLKDMFFAGDIHYNDELCITNVRHKAAIAEALESLKMVMHSIEDGMPEDFFSIDLMDAYEQLGHIIGEAVEDDLVDTIFSDFCMGKMEYKYEAYDVAVIGAGHAGCEAALACARLGLKTIIFTISVESIAMMPCNPNIGGSSKGHLVREIDALGGEMGKNIDKTFIQSKMLNSSKGPAVHSLRAQADKADYSRKMRQTLENTDNLTIKQAEIVDIIVEEGCMTGVKTHTGGIYPCKAAVLATGTYLKARCLCGETITYTGPNGLKAANDLSEALKREGIELVRFKTGTPARMDKRTIDFSKMAEQFGDETVVPFSFTTDPASVQKEQVSCWLTYTNEETHQIIRNNLDRSPIYAGIIEGTGPRYCPSIEDKVVKFADKNRHQVFLEPEGLYTNEMYVGGMSSSLPEDVQYQMYHTVPGLEHAKIVRNAYAIEYDCIPATQLKPTLEFKKISGLFSGGQFNGSSGYEEAAAQGLMAGINAAMKVLGRDQVILKRSDAYIGVLIDDLVTKETHEPYRMMTSRAEYRLLLRQDNADQRLTAIGHDIGLIDDIRYQHLLQKEVLIYREIERVSHVNIGAGPKTQKLLEACGSTPLKTAATLAELIRRPELNYKMLADIDEDRPELPDEVTDQVEISIKYDGYIKRQLSQVEKFKKLESKTLSEDICYSDIHGLRIEAQQKLDKIKPVSIGQASRISGVTPADISVLLIHLSQGGQKQHMQDMHNDEKPENDTHETANREMYSIESFKKKVNMLHIELSDKQYNQYVTYYEMVVEKNKVMNLTGITEFDEFIDKHYIDSLSIVNAVDIHQVQSAIDVGTGAGFPGIPLKIAFPHLKITLLDSLNKRINFLNEVVETLGLENVETCHGRAEDFGHRKEYREQYDLCTSRAVANLSTLSEYCVPFVKIGGQFVSYKSGNVDNELRESEKAISILGGEIGKVCSFVLPETDFARTLVPIKKIKSTGKKYPRKAGTPSKEPLQMIRGVYLNTMNDDLSKCMKIYQDVFEEDMNENVETWKNSNSEDMAIYLLLYNENEIPVGTARLIFDFDGVFKFDGLAVLPEFRKNGYGDFIMHMIFDKAYQSGAHYLVSNDIYHMPDYFKKYGFSIENNHLSLDLKQYFNTHKCCHMESKIFAKLNFDLGILVILSLILTVVAIVLVIMLVLRQSRLEMNYKIFMKGKNGKTLEDTFKAQFDDIDLVKEQTDLLHKRMMYVEKSLNRSYQKCGVVKYDAFKELGGQLSFAYALLNDSNTGFVMNCIHSREGSYTYIKDIVRGECELPLSEEEAEAVKNAIASNSPQPTTTTIAGGKKIRKITKSKAQSEETPSKKEAVAKKKSASQSTTKENEMAVKKKKGLGRGLDALISPTTSLTTHSETTAPKKSELQSTSSKTEADLKSTQKDATHSSNIVEKIVEVPVEKVVEKIVEVPVEKVVEVPVEKIVEKVIEKNAETLVKIDEIEPNRSQPRQNFDEDALQELADSIKLHGIIQPLIVQKKDDFYTIIAGERRWRAARLAGLTEIPVIIKDYTPMESMEIALIENLQREDLNPIEEAIAFQKLIDEYGLKQEEAAEKVSKSRTAVTNSLRLLKLDNRVKQMIVDEMISSGHGRALLAITDLELQYTLAMKIFDNKLSVRETERLIKNMLADKKNKKAAGIDPQTAIIYHQLEDKIKSIIGTKVQINAKSNKKGRIEIEYYSEEDLERIVSLLETIKMSRIIAVANQKGGVGKTTTAINLSACLAEKNKKVLTLDMDPQGNTTSGLGVDKNQTENTVYELILDESELSECIYPSVMENLSVIPSNINLSGAEIELIGFENKEYLLKSKLDMIRSDYDYIIIDCPPSLNLLTINAMAAADSVIVPIQCEYYALEGLSQLIHTIDLIKERLNPKLEIEGVVFTMYDARTNLSLQVVENVKENLDKNIYKTIIPRNVRLAEAPSYGMPINMYDSRSAGAEAYRYLAEEVIEKEDENEWLMKNQIVNLLSQNIEVLTSEEISQLIEIPPKPEMGDFAFPCFRLAKSYHKAPPMIAQDLKESIGDQAFLSEIKVVGGYLNFYVDKAQYAQQIIDKYNNATDYGCSDQGKDKTICIDYSSPNVAKNFHVGHLRTTIIGNSLYKIFSKLGYKVVRINHLGDWGTQFGKLIVAYKKWGSREAVEEKGIEELMDIYVKFHEEAEKDDSLNDEARAWFLKMEQGNEEALEIWQWFRDISLKEFMRVYNILGMEFDSFAGESFYRDKTADVIKRLTDDGLLKESQGAMIVPLDEYDMPPCIVAKKDGSSIYATRDLAAILYRKATYNFDRCLYVTGLEQKLHFAQVFKVIELMGNDYAKNLVHIPYGLVSLKSGKISSRKGNVIFAEDLLRESINKTTSIIEEKNPDIPDKEEVAKQVGIGAIIFNDLYNQRIKDVIFDWNKLLNFDGETGPYVQYTYARASSVLRKIGEVPDTIDYTLLTDEASIGLLKEIERYPQVIKDAAERYEPSVIARYSIDLAHAFNKFYHECQINVEDETTKYTRTNVVKIARYIIKDALSLLGIQCPEQMMKESRKKLLKGIVTAAAAAGAVYGMNRLVFFLSTMKDLLTSKEKSYYNWRFGDIYYARKGEGRPVLLLHQLSASGSDCEWQSMIDELAEDHTVYTIDLPGCGRSQKEKMVYTNYLYVQAVNDFVKHVIKTKTDIITSGDTSSIAVMACHSEPSLYGRFIFINPESLDHMIRTPGPQQKCLSYLLQLPLVGTLYYVLANSRWKVKRDFRTKYYYNGDRIEPGMEDMFYEAAHLGGFAARFAYASQVGYYTRINVVYALKQIDHSMYIIGGEAMEGMDDTIAGYTHFNPAIEAVRMEGTKGMPHMEKPVETADLCKLYLERMCKNNEIERNDEQPLLERLEAYGRTDVYPFHMPGHKRRLGPKEMGHLYEMDITEIDGFDNLHEPEGILKDAQLFAAELYHSEETAFIVNGSTAGLLAAIAGICRDGGEILAARNCHKAVYHAIELHHLKPYYIYPPINTKYGINEGIYPQDVEKMWITHQNIQAIVITSPTYDGVVSDIEAICEIAHRHRVPVIVDEAHGAHFCFSDYFPKSAVACGADVVIQSTHKTLPAMTQTALIHLNGDLIDRERIRRMLTIYQTSSPSYILMGSIDGCLHMLSENGEMLYKAYTERLQKLRNAIHEQCRWIKLPEYEELDAACSKDYDKSKIVLSVRNTGMTGRQFHEILLHDYHLQMEMVSAEYVLAMTAVGDSEEGYDRLLHALVETDAKINAMLEQNEAKKDALDEEEKLHDWAKLPVVSQKMTIYDAEQRKKILCRLDDAAGEIAADYIYLYPPGIPIVTPGEMITGAVIGTIHWWLSDGLHVSGVYEERDVRIICMGKLFCLIGKSASGKDAIFRYLRDNKELGLKEIVPYTTRPMRKGEENGVGYYFVDQAAYEKMCQNGKVIESRTYETINGPWHYFTVDDGQIRLDRDNAILIGTLEVYNQMKRYFGEEQVVPLYIEVEDGLRLERALARERMQDVPNYAELCRRYLADRQDFSEEKIAEAGILKRYENIDFDACCREIVRAVKIFMTGFGDIIGHEQIIEHFRSALKNHQVSHAYILNGENGSGKNMLAKAFAKALVCEAGYGDSCNMCRACHQFDSGNHPDVKWITHEKANSIGVDEVREQINNDIVIKPYSSKYKVYIIDEAEKMTVQAQNALLKTIEEPPEYAVILFLTNTLDVLLQTVRSRCIIMNLRSVDTKLIQQYLMQKYQLPDYQARVCAAYAQGNVGKAIMMATSEHFREMQDFLLRLLKRVDDMEVYEIVAAIHDMTTYKMDIRDLIDLMMVWYRDVLILKATEDINQLVYQDEHKYLQKKATTSSYEGLNNIMEALEKAKVRLNANVNFDITMEMLLLTIKENMVKVIGVRFRNAGKIYYFDPLDLDIEVGQNVIVETARGIEYGHVLIAPREVDDSKVIQPLKAVIRLATPEDDEIERKNKEKEKDAFKICLEKIAKHKLQMKLIDAEYTFDNNKVLFYFTADGRIDFRELVKDLASVFKTRIELRQIGVRDETKIMGGIGICGRSLCCHTFLSEFAPVSIKMAKEQNLSLNPTKISGVCGRLMCCLKNEEETYEWLNSKLPNIGDRVTTDDGFKGEVQSVSVLRQLVKVIVTLENDEKEIREYKVSQLKFRPKRRRDKGNVNDAELKALEAMDRKEGKSSLMDYLLPGERFDELQRNGYRIIQNPAKFCFGMDAVLLSGFARAKRGERVLDLGTGTGIIPILMAAKTDGEHFTGLEIQEESVDMAARSVACNGLQQKIDIVNGDIKEASGIFGAASFDVVTTNPPYMTDTHGLKNPDMPKAIARHEVLCTLDDVVREGAKVLKPGGRFYMVHRPFRLVEIFQTMTKYKLEPKRMKLVYPMADREPNMVLIEGIRGAKSMLKIEKPLIVYEKPGVYTSEIYDIYGYMEGTIKYVNPEQKYGYIKAEGEHDISFKMKEGREYPLNAHVTFDLIVLENSRRYADNIVLQEHGPRKHGKLKISNPYAPSKIENQIAENKESCAIISELISKSRGTKETVFPFNDYAYLPTYYQHRPENQWLIGKPSGYWINGNSLLYLKIKKQIRYQGTTQGNGIMVPKYGCDSLLLGKHVYKNICAFTKNAGIRPEFYHIAYLDGENSVAIISLAQLNTLLEKGYNGIAIGEYPGKRPDLPNRYMIPVTCFKEYRMAGKLYLCATPIGNLDDITYRVLETLKSVDLIAAEDTRNSIKLLNHFDIHVPMTSYHEFNKIDKAKYLVNQMLDGTNIALITDAGTPGISDPGEELVRFCYEAGIEVTSLPGPAACITALTLSGLSTRRFCFEGFLPTDKKERQVVLERLKKETRTTVFYEAPHRLLKTLPLLIEAAGEDRKVSVCREITKRHETVFRATLGEAYAYYQANEPKGEIVLVLEGVSQKKLDEEQQQSWESMSIEDHMALYTGNGMDRKQAMKKVAADRGVTKRDIYQYLVDCKGEMTNLEFENLLQMKKVFVKDNVSLPSRGEAGIFDLKSKTTNDKFYLDVDRRGRIEFSKFKIQNRFAGNKLPLVRIDIDSAPHMNPDGSKTSRNHIHIFKEMENDTGNLPWAYSLEDFEPIDFNRDCINFMEIFSGFCEYCNIIMNNIQGVIMAQLDIDFSKQYLEWLKQNIEQYQIRDSIFRITLPFLDRNNDCVEVYIVDNGDGTYQITDDGATINDLEFSGFDIETSERRKKILNSIVAAYGITRLDTNELVVKCTRDDLPLKKHMLAQCMVKVSDMFYLSKNTIQSVFLDDVQSFFDANDVRYVDNICLTGKSKLTTHYDFAIARSKKSAERFIKVVNNMDLNAARNIIFAWNDTKDMRQPEAKLYAFIQNTDKKISDDAIGALKEYEIKPALWSKKDSYISELIAMKSTGVVRKLDDLGRITLPIELRRNLNIGEHDPLEIFVDDDRIILRKYEASDIFTGNMDELIDFHDKKVSKQSIMEMARLAGLHVIEGVMRILPEETGAVVIDMQEKLMMAMNETKACEEKAAMLLKGLQVLSIPTVIVQQYTKGLGHTLPSLYEAAGTTEYCEKASFSCCRNKAVLDKLESMGKKNILVMGTEAHICVLQSCIDLKAAGFQPVMVVDAVASRREADKKIAIERAIQEGILVTTAEAVLFELTLDSTNPCFKAISKLVKMKEETTRLSASLEDYLKEIYLLNLEGQEVRITDIARSLGISKPSVNRAMNTLKELELLEHEHYGKITLTDAGRDTAKNILDTNKIVYRFLTEILDVDEQTALAEADLMEHDISKGTRKKLKKFIKKSTDKKSADKKSKMKGLFFMDNYDQLNEILVYLFDHALDIERNFLIRDTFKDISVNDMHVINAIGLHNEVNMSSLAKKVGVTVGTLTIAINGLVRKEYVLRTRSETDRRVVLVSLTEKGESAFRHHEDFHTRIVDAIHASLTEEECRILIKGLSSFEKNLKDIMSTKAYYPLNEIGAGKVGFSKTRSIIEAAFYGNNVVKVNTLKEAYNLAKNSPGTIVTDMPVYRGEEFGLDSDARVLLFNDGAITGRYATARRIAGEPGVDCDALDKVVMDAVYTARFKKLYHATVYAGLDPEFMVKCHLLIPEGEENILYNWMLNFQYMSDDYVKMYKASKPVGDGKEADIYIFSDPQWIPNEAPGVSLDCLSDPAKKTLCYFNTETNCACILGMRYFGEHKKGTLTMVWAIANRNGYASCHGGQKEYLLPDGSKYVASVYGLSGSGKSTLTHAKHGGKYEIKVLHDDAFIINTDTCSSIAIEPTYFDKTADYPTGCADNKFLLTAQNCSATMDEDGKIQLVTEDIRNGNGRAIKSKLWSPNRVDKINAPVNAIFWIMKDPTIPPVVKLKGASLASVMGATLATKRSSAERLAPGVDPNKLVVVPYANPFRTYPLANDYEKFKKLVEEKHVDCYIVNTGDFMGKKVQKEDTLGILEAIVEKRADFHQWGPFSDIEIMDWEGFVPDMQDKNYTDQLKARMNDRVDEIKAFATEKEGYDKLPDDALAAIQKVVDELKMKNTFHRLIAGLIAASVLLCGCSSANMLTSAAAHELYDQRYSVGTASDEVNADFDDFTREIFTDAVSTDALTLHFELKDPSAYDIDLDTIDLGRINLQNPIDTFVSDISTDALRQELHDFDYEELTEKQQQTYDILDEFLETEQTYDSKTLFYYPEYLSSTSGTQSLLPVMMSEYAFYSPADVDDYLLLLQDFPDCFNNILDYEQEKADAGLFMSDESADEVIASCQSFIEDPDNNMLIEVFPEKLESVSGLSDSDKADYIKRNDQAVHDYVIPAYQSLIKGMEALKGSGTNENGLCYFDHGKEYYEYLVKSQTGSDKTPEELIEWLDDTLQNTIVQMALLLSSDDSLADKLDEAIDISENDPKIILQTLQSSLKEDFPDAVSSQYTLKYVPESLEDSMNPAFYMIPPVDVTDSNVIYLNNSQITDNLSLFTTLAHEGYPGHLYQQSAFSATDPDPLRQAMNFLGYVEGWATYAENMSYTWTGLDDNLARCLQLNQDITLALYGRIDLGIHYEGWTTDDVTEFLSDYGLDDDETVHSVFRAIVSDPASYLPYCIGYMEFKELRDDTEETMGDDFNLKEFHQCILNIGPCSFDVLEKYIQKDYIRTMAKKPYYITTAIAYTSGKPHIGNTYEIVLADSIARFKRMQGYDVRFQTGTDEHGQKIEIKAGEAGITPKQFVDNVSGQIKEIWDLMNTSYDKFIRTTDEYHEKQVQKIFKKLHDQGDIYKGYYEGKYCTPCESFFTESQLVDGKCPDCGREVIDAKEEAYFFKLSKYADRLIDYINTHPEFIQPESRKNEMMNNFLLPGLQDLCVSRTSFKWGIPVDFDDKHVVYVWIDALSNYITGLGYDVDGNSDELYKKYWPADLHLIGKDIIRFHTIYWPIMLMALDLPLPKQVFGHPWLLVGDGKMSKSKGNVIYADDLVNYFGVDAVRYFVLHEMPFDNDGSITWELMVERMNSDLANILGNLVNRTISMNNKYFGGVISNPGVNEPVDDDLKAVALAMHEKVDAKMEKLRVADAITEVFTLLRRCNKYIDETEPWKLAKDETKQDRLATVLYNLMEGIRMAAVALAAYLSDTSARILDMLGTQERDYLKLDQFGLLETGGKVVEKPEILFARVDIKELMEKVEADKAANAQAQSAAAPAEEAETEEGIDIEPKAEITFDDFEKLQFQVGEIIACEAVKKSKKLLCSQVKIGNQVRQIVSGIRKHYSPEEMVGKKVMVVTNLKPATLAGVKSEGMILCAEDADGNLSLMVPEKKMPAGAEICMTIYRADMLSAQQNFILRRNLQVSFEQEKERFGCKERKSFVNTEMLVFIIEIIGTVAFASSGAMVGIRKKMDVLGVIVMAVMTAVGGGIIRDLVLGIHPPNTFKNPIYVEYSVLTAVILFVVFYIKKQMLDSKALFYYEKIMILLDAIGLGAFTVIGVETAYEIGYVHHRFLLLFVGVITGVGGGMIRDMMAQQIPFILVKQIYACASLAGAGVCIWLMPYHKSASMILGAVVVVIIRILAATYRWDLPKIEMIFETHAHYDDKMFDEDRESLLESMQEAGIGRIVNIGADLASTASSIALAEKYPFIYAAAGVHPSDAAQLNEHTFQWLSEQTAHEKVVAVGEIGLDYYWEKDPEVRANQRYWFRRQLNLAREKVLPVSIHSRDAAKDTLEIAKEECLAEIGGVVHCFSYTVEMAREYLNMGMYLGIGGVLTYKNARVLKEVVDYAPMDRIVLETDSPYLTPVPNRGKRNSSLNLPYVVMAIAEIKGITTAEVEDITWENAMKLYRMAEMPQVYEPEFKRKLVRLHLEEGRSYYSLFQRLSIGIFMNGTTTEYLTAGGSVLSEKKNGVWQHYLYDGSGQLMAIRYKGADYYYIRDSLMTITGLVDANGVAVVNYRYDSWGTVTGITGSMAASLGKDNPYRFKGYYYDDETGMYYLKSRYYMRFDKNVDVEVKRACKEYVQWLKSIYRFPVRVPIYFKETKYIKTSSKDLVSAVFFGPNDLMVEPYIKIAVGDYNDLCKIQGKDDALAAILCSITHELTHYFQWIKYHELWLSGGKNQYFERQAVYYGRQIVYDYADTREHPMGTNSLGRVYGKYTHSVGDGYGYSKLSIKFPEIMAVAALVIYAPEVLGAIETIGAVISIFDMNTGTVQIMWKEIIVGFIILYLLRGVLDVYMIKKYEKLLKLFGVIEMDTLKLEAEKHLKLCNFFSVGPWNKAIYWTYNGLCWLLATISYVEDDEYDFLAYLGKVKNEQEFEMKSFVLALYYRSKKDFNQARHYYDVYLTSKHVNNDIGVIMDSVWSGKAKSELVAESVKKFENPVLRKLFAENHILMEKLSNPQRTIEVIKKYEFCFQKKFGQNFLIDGHVLDKIIAGAGVTKDDMVLEIGPGIGTMTQYLAEAAGKVVAVEIDRNLLPILQETLADYDNVKVIHADVLSLDLEKLVQEENGGRPIKVVANLPYYITTPIIMALFEQHVPLANVTVMVQKEVAARMKSGPGSKDYGALSLAVQYYAEPYIVANVPCNCFMPRPNVDSAVIRLTRYEEPPVQVKDEKMLFKIIRASFNQRRKTLQNGLNNSSELNFTKDQIAAAIAEAGFSPSVRGEALTLEQFAKLTDILLKAMNEYYDVIIVGTGAAGLYCALMLPERKKILMLTKQEADLSDSFLAQGGICMLRGEDDYKDYFEDTMRAGHYENNERAVDLMIRSSNDIIRDLVFRKVDFARTADGELDFTREGAHSRPRILFHKDITGKEITSTLLKQVLTKENIEIREHMTMVDLIEKDNICGGVVAMDEENHVYPIRSQYVVLACGGIGGLYQNSTNYPHIAGDGLGIAMKHQVEVEHLDYIQIHPTTLFSRSKGRRFLISESVRGEGALLYDKNGQRFTNELQPRDIVSQAIFAQMEKDGTEFVLEDMRPLGEKTIREHFPNIYQHCIEEGFDPIKEPIPVVPAQHYFMGGIKVDLSSRTSMKGLYACGETSCNGVHGKNRLASNSLLESLVFARRAAYDMLFGQAPDPCQAEPDLKRYEDKEVLLEDYHQVVLEGIGRMRGNEMNSITMQLQADKLIRMALEEDITSEDVSTNAVMPTKVQGTVDLIAKEDGVIAGMDVYARVFKLLDEDTEIEMFCHDGDEVREGNLMAKVTGDIRVLLSGERVALNYLQRMSGIATYTRSVAKLLEGSGVTLLDTRKTTPNCRVFEKYAVRVGGGCNHRYNLSDGVLLKDNHIGAAGSITKAIQMAKAYAPFVRKIEIETETLEQVAEAVEAGADIIMLDNMTPEVMKQAVALIDGRAQTECSGNITKENIARICEIGVDFVSSGALTHSAPILDISMKHLHAVMKTAERRNAILKLLQNAEEPVAARKLAERYGVSRQVIVQDMAVIRAYTPGIISTTKGYVMEQEPRCVREFKVRHKQSDAAKELNLIVDCGGRVCNISISHRVYGRVSAEMDIRSRQDVTEFIAALNDSQSTVLSTATSGYHYHLVEAASEERLDLIGEQLKAAGFLAPLRPWEQKKGEMTIAEIQQEIMRMKKEQDICILAHAYQGQEILEVADYMGDSYGLSVQASKSDCKGVIMCGVRFMAETCKVLSPDKKVWLANPAAGCPMAEQLDLEGLRELKAKYPDYAVVAYINTTSELKTECDVCVTSSSAVQICSRLDNDKILFIPDPNLGRYVAEQMPEKTFAFYKGGCPRHIVVSAKDVEKARKAHPNALLLVHPECRQEVVEQADYVGSTTGIMNYAKKSDCREFIIGTENSIVEHLQFDCPDKSFYPLAVPLTCMNMKITTLMDIYKCLKGCGGEEIQLPENVIEGAGRCIRRMVELGEMIGKVALFLDVYPEYKCETYRFRFPESENTKMKKKKKLSLAGQIFIALILAIIAGLLMQSHAEFAENYIKPFGTIFLNLLKFIVVPIVLFSIMSGIISMSDIKKVGSIGLKTVIYYFCTTAFAITFGLLFGNLFKNAFPVVATTDLSYEVTEAPSLMDTIVNIFPSNFIAPMSESNMLQVIVMALIFGFSIILIGSEKNSRLVTAINDLNEVFMKSMELILKLSPIGVFCLLCPVIAANGSNIIASLAMVLLTAYLCYVIHVAVVYSLAVKAIGGLSPLKFFKGMLPAMMFAFSSSSSVGTLPINLECVEGLGASREISSFVLPLGATINMDGTAIYQGVCAIFIASCYGITLTPTQMLTVVLTATLASIGTAGVPGAGMVMLAMVLTSVGLPVDGIALVAGVDRIFDMGRTVVNITGDASCCIIVSNLERKREARKSARNAMNQQKMIFFNDKISFPPNFLFKNGIIALKFAGKKDEILMFYKIWEMQTITLEEAQARLLEVVHCVMSEKVELLRSIDRILAEDVYAHVSQPPFERSAMDGYAVRSEDIRTVSRSNPVCLKVIDRVCAGEVTDKSVHAGEAIRIMTGAMIPEGADCVVKQEDTDYGQEQVKIYVSLAQKMNCCPVGEDFHQGDCLGWEGEKVDAYMMASMASGGIDSVPVRRKVRAAVITTGEELMPHGQPLLPGKIYNANLAYLTGRLLQLDCNLTEGIFVGDDADKITAAVEKCAEEADVILTTGGVSVGVKDLLPEIMKKLGADILFHGIDLKPGMPTMASLYAGKPVISLSGNPFSASAVFELLMQPLLQKMTGSQQTSLVKKEADIAYDYPGNKGSRRVLKAYDDGHAVHITKGQHNAQMRQGIGTNCLVDMPAGTGPLKAGDKVHIWRLMNEVKTPKKNWFYYYTIVLLILIILNTFIMPLIQQHSVKEVDYGTFISMTEKKEIGKVEIESNQIVFTNKDESQIYKTGLMDDPNRTERLYESGAEFSSEIIEQMSPLVSFLLTWILPLVIFFALGQYMSKKLMNKMGGGKDSMMFGMGKSNAKIYVKSTEGIKFSDVAGEDEAKENLTEIVDYLHNPNKYKEIGASMPKGILLVGPPGTGKTMLAKAVAGESNVPFFSMSGSEFVEMFVGMGASKVRDLFKQAKEKAPCIVFIDEIDAIGKKRDGQIGGNDEREQTLNQLLTEMDGFEGNTGVIILAATNRPESLDPALTRPGRFDRRVPVELPDLKGREEILKVHAKKIRLSDDIDFNKIARMASGASGAELANIVNEAALRAVRDNRRFATQADLEESIETVIAGYQKKNAILTNKEKLIVSYHEIGHALVAAKQNNSAPVQKITIIPRTSGALGYTMQVDEGNHYLMSKEEIENKIATFTGGRAAEEVIFGSVTTGASNDIEQATRLARAMITRYGMNEDFDMVALETVTNQYLGGDASLACSAETQAEIDHKVVELVKQQHQKALQILIENRAKLDELAHFLYDKETITGEEFMNILNAMKILRNINNIFIKSLVDGRNDTMHTYSRGGMPAPAMMERSGADSVRRIDGGEICDMRLMLSYLKRYKGLVFLNFISVFGFALTELGIPTIISRMVDGGVASGDREYLLKMGGLIALISVVGILGTVVLGYCGARISTAVTCDIRNDLFEKVQSFSHREMNQLGVSSLITRTSNDALQIMNFMNIILRTAMLTPVMIAVSFTLIIMSSVKLSLIIAATVPFIILGVILVAKISGPVSERQQTALDGLNRIFRENLTGIRVIRAFNNDARETERFGEQNQAFTNQSKKLFTLMSSTEPLFFLLMNIAALAIYFVASQMIDQSALQVGQLMAFMEYLFHAMFSVMLFCLVFMMYPRANISAKRIEAVMNMTPDITNETVSTQRVHDDREPIKEVIFEHVDFCYPDGEEAVLKDISFSARAGQTTAIIGSTGSGKSTLIQLIPRFYDVTGGRVLVNGVDVRQINSHKLREHIGFVAQKANLFSGTIEENIRFGCSEATDEEIRHAADIAQAADFIMDKPKGFKERIVEGAGNLSGGQKQRLSIARALVRKPDIYIYDDSFSALDMKTDAVLRQALKPEVKNAIVIIVAQRVSTIMEADQILVLDEGRLAASGRHEELLKTCPLYYEIAASQLSEEELQNVCMSVDRTENKNDRKGLAQVGYCLKYLMNFLRPYKGGLILGLLMVVVANITFAVMPVVEGEMTTQLFSDGEAILKGVEGAHVHFDVIFGIMGTLVIIYIIKTVSQLITAVFLTRVLQQAMCDIRNALQKKIQRLPVRYFDDHAFGDVLSCVTNDVDTLSNALQETLQRVLAAILTFIFVIGMMFYIHTILACIAILIIPLSLIVTRFFVTRSQKLFDTQQETLGELNGTITEMYGGFNEIILYNRQKMALDKFHDVNDRMRKASFRAQFASSLISPCISLITYLIIGSVAVTGCLFVMNGTLLLGNLQAFVRYIWQINDPLSQISQLSSQVQSAFAAMGRIFNLMDEEEEVQNGKVEIRPDKVRGEVTFDHVVFGYDDETLMRDVNFQAKPGKMVAIVGPTGAGKTTLMNLLLRFYDVKGGAIKIDGIDIRDMNREELRQLFSLVLQDTWLFKGSIYDNIHYGRLTARKDEVISAAKMANVHHFIKTLTGGYNFEINEESSNISQGEKQLLTIARAILKDPRIIILDEATSSVDTRLEKMLQDAMHKVMDGRTSFVIAHRLSTVRNADLILVVDHGDIVEQGTHEELLAKKGVYENLYHSGTSLANHQPVCMSSKRRRKKARVPGLIITIILLLLVAEFVGLLAITKLLPVYLLFAVGIVFMTCVLLVAMLTGNFRKKVRFIIGAILGVLLLAILLLGNLYVMSTYNTLNKISGVNTQTSQIGVYVLKDDSAQSIEDAKSYTFGTLSNLDTENTQAAVKQIEERTGQSVKTQEENGVTKLVDSLLDGSCDAIILNHAYLPVLEDMEGYADIEDKIRELDLLSVDVEIKTDDTASSDDTAKQTDPDNIIRLYISGIDTRGSEIINTRSDVNIIATINTDTKQMLLVSTPRDYFVPLSISNGVPDKLTHAGIYGIDVSMDTLGMLYDISLDDYFRVNFAGFIKIIDALGGVDVNSEEAFTAYTDSRYSYTKGINHLGGEAALAYARERYAFSDGDRARGRHQMEVISAVMQKALSPDILSHYTDVLAGIDGCFETNFSYDRLAELVRQQLTDSGSWNIVSYSVNGSGDTRQPYSMSANAYVMIPDQTTVDKAKELMQQVVDGEVINLNEMNYVVVDFEWNQACYGKGSENRKIPFEIIEIGAVKLDENLKEIDRFSRTIRPKVYKKLHYITRDLTGITQEELCASDPFSYVLVDFMLWCGKDYIFCTWGNMDLVELQRNMKYYGLLDLLKGPVKYYNVQKFFRLLCAHDASAVSLESAVDYFQLPKEAGFHRAVNDAAYTADVFRRIDQEEAKKLYSIDYYQNPQSKGDEIHLRYDSYYKYISRVFDTREEALADREVRSTKCYKCGRAARKKMHWFSARTKAYYCLADCPEHGYIRGKLRIKKDDEQHIYIVKTLRLIDEEGAQQLRQMKADVLKKRRERRQKGCQCHMNWVAPIKDDETLQKFRDTLRSVDDKYYILFEIGIGTGLQLQDILQFKVKDVRGKDMLIAVIGTRQIEQAFPLKPELQAVITDFIDGRDDDEYLITGYASTNRPLSREQAYRIFKQTGNKIGLKSIGTQTMRKTFAWRYYKETGDIQYIQNLLNHASPNITFRYIGEKPNIKVIYDKITDDGNQKAMEYLLKDKKGVRDIDAIILELKQIRRKLSGKRQPLPYYGRVDTLLEQMHDTLRDFNQSHMKKLISLFTVLLFILSGCLWFSTDTYADETKSSDSETAASETVPETQASPVILPTDKVSTDDIILYSSAACVIDVDSGEILYYKNMDDRHYPASITKVLTGLLLIENANLDDTITFSQDCWNGLNYYNDMNIGILNGEQLTVNDALHAILMSSANEVCNGAAKFVSGSVSAFCDLMNERAKTLGCTNTHFVNPNGLHDPDHYTSAHDMALISREAIQNPTFREITGCTEYTVASTNLRPEGFPLSHKHQMLMYTKYHYDACIGGKTGYTSEAKNTLVTYAEKDGHTLACVVMENSDGHIYPDTINAMDYCFDHYDQLMAQMADTAANTETETSAFAHSGETEDLPAFAPLTETETETEAAVPDARTSLSPKVLASHLKSKLMTFAMQHMILFILCMLVAFALFTLILIWLYHVLKRSYHRHKYKRLRNERIKKNIKNKMLSKEMQEKLMGEIKRSDKFIELIGIKIIEADEGYCKAELEVDDRHLNPLGTVHGGCLYTLADTVAGFAAASCGFEGPTLSGNMYFLRPTMGVKKLTCESRVVKNGKRIRVVEATIYGDNGQEIARSLLEYMDMQREMIVKMLTGAQVMVKCLEAEGIKAVFGYPGVAICPFYDSLYDSGIRNILVRQEQNGGHMASGYARVTRKPAVCVATSGPGATNLITALATAYADSIPLIAITGQVSSELLGKDVFQEADITGSAEPFVKYSYLVRDAREIPRIFKEAFHIASTGRRGPVLIDVPLDVQQKQIDYVPVNEVSIRGYKPTVKGNNLQIRKVVDVLAHAHKPLICVGGGTILGNGEQVVREFANKFHIPVVSTMMGIGVMPNDDDLYMGMLGTNGKPHANYAVHECDVLVLVGARVADRAVVKPYKLERRNTTIVHIDVDPAEIGKNLGTTVPLVGDVHVIFENLLQYEIPGDYTAWNEELAEKKAAYVDRRHFNPDFVNPCRFVQTLSSKMNDDAIYVADVGQNQLWSADNYVMKHGRFLTTGGFGTMGYSIPAAIGVRAALPDTQIVAVCGDGSFQMSLMELATMRQWNLPIKFVIMRNGYLGLVREYQHHTYHDRYSGVSLDGSPDFEKIADAYGLDYFHLEHNDEMEQRIDEFLACEHAAMMVCEVYSFDLVKEMKGIFSVLVENKAGVLSKTAGLFARRGFNIDSLAVGETDDRDISSMTIISTGDERIMEQIEKQLNKKIDVIKVRRFAENKCVTRELLMLKVTYTNVTRSDIMEICNITGAHIADLSPKSMVIELTAKTSKIDRFIKLMQPFGIIEMARTGALAVQRDSNEMRLRNVRGSRETIAADECVLHDPEEQRAQKGRWHELFGNDHPIHIEVGMGKGQFIMTLAQQNPDINYIGIEKYSSVLVRALEKYHTYEGDNIFFLRMDAEEIADVFDENEVGRIYLNFSDPWPKDRHAKRRLTSKEYWARYDRILCPEGRVIFKTDNRPLFDFSLEQVEVAGWQLDNYTFDLHHSEYAEGNVMTEYEERFTAKGNPICRLVAHRDPQKKGMASFKQKMANKAVLFAYDHKQISKRGKRLGDSYKEVKKTIENIGKDKTRMSKELMNTTEMKEVISKRTACMKVFEHADHRFTAAIYGTPVHYMKDGHWEEIDNRLEAAADEVPADADDMENISGAFRVRLSNKVKKKQMVSLGEGSRKLTWGFVDANSVKRQILKETEEQQPDSAGALEHTADSEKDPTAAYAVRHLKSRILYPEAFQGVDIRYTIGPESLKEDLVLKQADAVHAFTWRYAPSGLKARQEGADIVFEDAGGREAYRLSAPYMTDAAGEVSHGLTLTLTDDGGEKNKEAYVRLEADAKWLAAEERAYPVVIDPVVTTDVARDKIQDCHVSSFYNTDNFYNSHILKTGRVDGSVLRSYLKFTLPQLNKASEMVTSAWYVAIRRPGGSDQRRIDIHRVTKDWNSKTVTWDNKPSYDPKVADYIAFSGSGLTRLVFDITGVVKDWYADGKNYGLMMKEHGEEEGTYNEYISSDDNLDDNAATRPQIMIQYVSCEGLEDFWTYHQHDIGRAGTGYVNDYNGSQILVHPTYALSGSRAPISLSHVFNSSEQGADIGYGKGFRLNYHQTMTAKKIGSTDYYCQTDGDGTRRYFAKDTTDSKWKDELDQTRILTLDSSNRYTVTDKDGGKQHFLNGLLVKEEDASGNTLSILHNASKIVKLTDGSGREVNLAYGSDGHLSKLTDAAGRVTTFGYTNGFLTSITDPDGAVSRFTYDTAAGKGMMLTAADPYGYKVQYSYGSRAPYRVSKVTEYAGSTEGQSLALAYGHNRTSFTDSKGRKEVYLFDNSGRTVSVRNDAGYGAAWQYLDTAKNKNKLSAATDLRYVSPQYLRGVTGGVAGWTRYSNADHVVVEDSTAGEGYIGTKCIRIRSTAVSGDGAAYQNLTVKAGKRYVFSAYVRASVSELAAKGRIWLQIEDTAKNLAVVADSGSITAGTEGFKRLSVAFTAPDNGTGNGTSSLRILARTRNFKGTAWFDGLQMEEGEAAGRLNLVSNNCFQNGMTDHTALQFAGGDGVLKTGAAAQVPTVLKGTVNEDKVNIRAAAGTAYPALVMAPKGTSATIHGADYDSDGSIWYAIRAKIGNKTYDGYMKGTYLNLSISGAVVTVRGMVAADNLNLRAGAGTGYSAKIMMAAGTAVGIKGAAKDSSGTKWYRLAFTKNGTQYDGYASADYVAVMRPSTSHAAPSGTLNVRTEPNTSCSVAVQIGSSDKVNIVSHAGLKNGDLWYGVKLTKGGKAYTGYVLSDLVTVSSTDVPAEIRMGQQEKVPGGNGPTGDSVLKITGDEKNNKRCYQPLAISGKKGDCFMACGWGYADSVSLKEKFFESDPHAGNSLNSRKNRHFGLHINFISSDANDRNDIHYAEFGADCSEWQFMNTAFVARHDYVRVDIGFAYGSNSNNAYFTGLGLYKEEYGTSFAYDDKGNVVKVTDQAKKNSSFEYDTADNLKKLMDPKGNAFKYDYDKKHRVTGAASAAGMKYTFVYDDYGNPVTARTVDPSAETDAKKAMTSKAVYTTGTAEGQYMASQTSPEGSVVTYEWDTARGQMNSTTDAAGNKVLYTYDTVGRLSSVSGKRAIRGNEKEIKGVYTYEKDRLTKLTHNGCEYSFTYDGFGNGTGVSIAGTKVIGHTYGAKNGTLSKSTYANGWEVTYTYDNLDRVTEVKASKDGTSYTIGRYIYDKLGRVARFVDGQVSEKSCTYGYDLTDRLCEAIFDDGTAYRYTYDANDCLVKEVQTTPAGVRTVTRGYDADSRETSVICGSAKIEKTFDKLGRLSSIKRNSGKHTTVFQYMKAPDGGETGRVASIKNSSDAISYGYDKRGYVTSATNGSTAWKYHYDASGQLIREENPVQQKTFVYQYDEGGNLLEVKSYPMTDSAEPEGSGTVEKAFTYGSTWKDQLAAVTMDGKTRTFTYDANGNMLSDGKYTYSWTKGSLLEKVTGDGLEAVYTYDASGIRTSKKVNGTTTEYLTAGGSVLGEKKNGVWQYYLYDGDGQLSAISYKGGDYYYIRDNLRTITGLVDANGAAVVNYKYDSWGRMLDITGSMAESLGKDNPYRYKGYCYDEETGMYYLKSRYYAPEICRFISADDISAMLDSPMSLWDKNLYVYCDNDPVNKKDDDGEIADFVAMGIIGAVANVGISFITAKMLGQDYGWQNVLEDSISGALCAIPAISMISNSEKYLKRAGQIIMVGKAAWLAISGYLKGYSLKKTALYMGVNLWLETPNFSGIVDPKIPEELIKQIGRNLVYELGFSSLRMGVNTGFDIASGNNNSKKKGNQSNKKNKSSNKWTPPANSGYKNKNGVVLIPSPIDYIINMSQLKRMIIRPKRYAGLFMALIIEFIMIPFYIYAASLKMFLVEMGIVQILVLGVVLSIGKTIILNEKGCCLSWLNGLIRKEYDWEQLKTKRVLYKTDRRESYGFEAEKCVLLSTRIIKNKSVWNNPFVQSEKYTEVEKGADFVDNLPFIFKPINIIYIYFNPGIGKSDKDGSCYEMVDEKVFMEKMAEWHVELEDNKPEEIPPWKEQIMAYTYDNLDRVTEVKASKDGTSYTIGRYIYDKLGRVARFVDGQVSGKSFTYGYDLTDRLCEAVFDDGTAYRYTYDANDCLIKEVQTTPDGVRTVTRGYDADSRETAVACGSARIEKTFDKLGRLSSIRRNSGKHTTAYTYETAADGGQTGRIKTVKNGSGTWEYAYDAWGNVSKATENGSADSHTYTYDAQGQLIREYDPDKKLYHGYQYDAGGNLTEVRSYPAGAEGGPDGTGTVLKRFAYGSTWKDQLASVTMDGKTRNFTYDANGNLLSDGKYTYSWTKGSLLEKVTGDGLEAVYTYDASGIRTSKKVNGTTTEYLTAGGSVLSEKKNGVWQHYLYDGSGQLMAIRYKGADYYYIRDGLMTITGLVDANGASVVNYFYDSWGNMLNITGSMAASLGRDNPYRFKGYYYDEETGMYYLKSRYYQPEICRFISADVYITTELNTNGSNMYSYCKNNPVMLMDSDGSFAILAIAGAFFAKKGTEMLVGAVVNVVTTGLAASIVGEKYTLKDAAMAALTGAAGALGAAGSLAAGLISGFVAYGSSREQGEDKTVSFTNAVMAGAFTVGSTGSLSTFLTGSSLIKTATEVEIKLGASAAIGATCDFGYNLMSAAASKAYNSSVHASKKNKVNIQACAIASVIQIAVYKAKSMKKKQNNRRKKGWIDLEGIRKRRTYNIEYSEKRRRFVYVRIYSGTLHLRDVIKISEKEKIKITEMCVPTNGELCSSDTACSGDIVILPNDVLQLNSILGNEMLLPQRTFIENPLPMLQTTIAAKKSEQREILLGALTEISDGDPLLKYYVDTTTHEIILSFLGKVQMEVICAILEEKYHVEAEIKEPTVIYMERPLRKAEYTIHIEVPPNPFWASVGLSIEPLPIGSGVQYESRVSLGYLNQSFQNAVMEGVLYGCEQGLYGWKVTDMYYLKSRYYQPEICRFISADSYDVLTQSPMALVDTNLYNYCDNNPVYREDENGQFWNVVIPALIGAAVGTFLTWAATSATGQEYTTKDYLSDFADELMQTNYDKVANNVMDVVENAGREFVGAITSRIFNSDPSKTKSSKSVKNSFKRTLISNRIIRKGKKVYRKRVYYYRGRKEWRIERIHMDEDKIIIIPEKYYMQIYQVGFWFLIIMSIICIAYGFFANEKAWLTYTIIGNVVGEVILIREWFSFGRVIEMDKEGCTVKWRNRSKEYRWSELKTRRIENNIKSCYTDCRKCAVISPYEIKRFRKKEPMSYFINILHWRDWSTFYVYLDSGKINDGKNSYEGGINESIFRGKIAQWGVTFDDVNLKKVKPWEEILMIYQHEYQTEEALYTAIEEFTYTTYNHRRPHSYNNYKTPFEARKTAMTKKAEMICLSQHKKQKALKNFRTEQLSENYCDHYQNMINRGDSTKKINLAVDNIGVEVSYTSNNIAQSSSKYFDLTDMKLHYKTSVMNQLDDMEESEYTDIGIGGLFIVGALAYVAGGIGTIALPVVMIAVRVIIEVIIFIYMMGLSIGLRKQKIKKTQRIKMIRIFLTIMFLVVVPYSACIPVENFFITFKTPEQAFKCENWLMPKGEIQDIIYGEDSCFVIIKKKEKKAVMGAENISGMGDILWHVNGTKDYYLSGDKWSDNAEDTIEVSDNLGTQFIQERGKIDEYRDVKIYTHEYYGYVYDMTEQYEIYVDGKNYKPTFEYKYSFPMDGQVFGKSCTYGYDLTDRLCEAVFDGGTAYRYTYDANDCLVKEVQTTPDGVRTVTRGYDADSRETSVACGSVRIEKTFDKLGRLSSIRRNGGKHTTTYIYETAADGGQTGRIKTVKNGSGIGMVIGAASSAITQYMFNGEINWKSVGVAAVGGFVSGAVAASPLGLTGQIGVGAAVGAVSYVADCKVNGSALKVDELAVSAAAGAVSGGIGGSGANQYKALSNTIKTASKTTARFTRLISTKGSASLAAKRIAEAKMWRDTVLKGTTWISSIKFAAGTGTSNVIAQLWTKAKNKVRSWFKMIKAMARVILWFAILSFMGWYANSLSIRRIIKKVGIRIKFYPAHYIMPSRKMRKIFKLDKKEIPKWTYLSLYLSFVYIILFLVFLILFLLLDAKVMVMDVFHTVYIIFMWMDVIYSTIFIFLYNVMSRIKFYPNTYSFYYPLMDNEFKSQPAKDKIAKKRIILYRSIFPPYMRKIFKLDKKEIPKWMYFLLYLSFVYIILFLIFVLYVLIDDELTILQVFLYGYGILIVANIIYLAIFAFLYKIMAGSLAASLGKDNPYRFKRYYYDEETGMYYLKSRYYQPEICRFVSADVYITTELNMNGSNMYSRKYRKFINIFDRQFFNKNSHKGRNMDRSGGYSEEENVQLKIYSDQDTHGMAAWVIIFALVFCGLMYYDSGETRWELIERVVLGGVPIISLTITLAMYVAWELIERVVLGGVPIISLTITLAMYVAFCRELVMSKEGCRVSFWKIHQFYKWNELSVKRYENYKDMMYSTPRGMKRGYEEGIFFSLKKVKKPKWMQPKTYCCWRRPWSAFYVNFYPGGIDADLEELQPEKGIIDWTMYLEKTKKKPTMKQIWTTRDEIEELIAGHAVKKRIRMDLTYDEVDNTIDNVWSVLFTTGYLTREGREMDGIYRLIIPNKEVREVFVLQIREWFNRVVANDRASTEKINRGFLEMSFFRAVTGKGKIAVKPDKIRLYVNKEELCKEYEDTLRRSTEDTELLKDLFEKLGFQRKDLKTVYFNVDTEYESYQDRDKSWKRRFKGYKYNHHMKIEFAADNKRLGQVLYALAHSSLRPEFSIEYTVADVEKCKNELLHKAIEDSIQKAQVLTTAANVKLGEIQAIDYSWGEIDFVTKPLNEMRLMECTECEMSAPGAYDIDIEADDINVTDTATVIWEIAMAYLKIFPIKVTDKKALDYITNPDKTEEKLLVSSFGCSPETADLEFSMTREMAKKNGMDKGDNLAFHLIQSFKPGEVDAETAHRLGQQFANEVLKGKYEYVISTHVDKNHIHNHIIFNAASFVDHHKYVSNKRSYHKICRISNRICHENGLATSMPTGEEGKSYKENMEYHRGTSWKAKLRVAVDKAIWTSINYEEFLQKMQLAGYEVRQGKHLSFRAPEQKNFTYMKSLGSYYSEENVRIRLAKNRNKIKAPRHLSREARLYINISTYVTTGNREGFERWAKLNNLKEAARTFNYLSENNLLNYEDFQQHVSDVDASVKAADQRITQINSELSTQKIIQKHCDSYRLCRKVIEDCKSAKNPKAYRTKHQAEYQLHDSLKKELQDLGVTKIPSSNKIQNRIENLESEQAATVREKQELQKKQKTLNIIRQNFTALLNAPEMQIPISEKELTLMAKRKRNIQILFCVSPEEKKLIRRKMIESKTKNMGAYLRKMAIDGYIVNTDTTPLKKQYEEMHKIGVNINQIAKKVNSTGDLYPEEKQELKEMVKELWRILRSSQLKMLVFRKCIYTSCPCYLPVAQPPEESLKKEPSINKVLREEKEDIEAQKYDASMILWYSKIMSRKNHKMIDGRLLQTNKKYSQLKMKQKEKIAEWMFQATRDYYMKKCTFPSDKHLEEVVDSVYEKIEDAEIWIPYGEVFKHYKSKRSDINKRVRKSLNEKEESQIEKVCFMNMCMIQDHKGNVLALDKVNDSYTGTTFPGGHVEANEIFQKSMIREVWEETGLTVEAPKLGGLYHWHKSGVHYVITLYKADKFTGELKSSEEGRVYWIPLEELKTKELATGMEHVLRILESEKVDECYMHLEADGYVGDLYMINLNKHRIDFGKGDVGIGVIGNTTDSAQLAFYNQSARPIHILKNPDQNPGFEPMEFKEEPFIMSFSNPESIDAVISILQRAKYINFTSKNEPQKTEMSSKCIRDTVSKVKTKYQESDPYRLAAAMHIIVKKLPLGTDPNCCKGFCMRECRKTCIVINCDLPEIIQQIILIHEIGHALLHQKTLQIKCFHDFELFDGVSQCEYEANCFAADYLLEDEDVLEMLNADMSFFQAAAELKVPPELLDFKFRMMKRSGVQIVDSPITSNSDFLKDIPTSGIIENYMNFSDKIKFQREQNHLTQKELAELVGVSQRAIAAYESSGTIARISTMRKLAHALNVSYDYLKHDEITDPSYGIEKMDYIDEVNGQLGEKGARDINEILEANRALFAGGELDEEAKDAFYQAVTKAYLSCKMEAKKTFGRKKKNTETERDSMSRTILHSDMNCFYASVEMLHHPELAGKPMAVGGDPEARHGIVLTANYIAKRAGVKTGMALWQARQVCPEIIFVPPRMDLYLRFSRMAQEIYSEYTDQREPFGIDESWLDVTASTSIKGDGMKIAKEISSRIKYELGVTVSIGVSWNKIFAKLGSDYKKPDAITEFSKDNYKDIAWKLPVGDLLMVGRSTERTMKKLGICTIGDLAGAEPSILETYLGKMGLVLHTFANGWDKTPVSVEGYRAPIKSIGNSTTTPRDLVSELDVKIILMALSESVGARLRENGFQCRTVEISIRDNGLYHFTRQCKLDRASNLTEEIARTAFELFQKNYNWEHPIRSLGVRGCDLVSEEMPYQLDLFMDETKREKIKKMDQVADEIRGRFGYQSIQRAFMYQDKILAQLNAKEHTVHPQAYFHGMTAKVYVDVLAVFSREGELIPTAFVWEDGRKYAIDKVSKPERCASRKAGGTGYRYTCQVGGKICHLTYEENYKWFMERKMQRIQDMFINMEEVAEDAYKNTELLLSQYTKVMFRIEKNLVDIDYEMYAEEGKHLKEMLYDLVDFDATAEKRRIQEKLLNNDMNLCLLEIMRDSLIALRDYPKNGQLYYRLLKYRYFEAGNTNEDVMLMLDDMPSTTYYRNRKKAIRLYATMLWAFTRPEKIQNKMEEINWKKSGSKVAVNMSASSLHLDMLFLSGIYLLKRKLFQICNLFFGYKKRPCPSGHSLTPMEERKYTFYDRYQKVKYANITAEELEVLNISYNKEHYMFDQQHQRNNTVLFCGLESENSCATDFIADDGRDIASDITTEIFFKELFSDLTEKEKKIVSDYFIMGKQVKETAAELGISTRQVSRDKNSALAKMLKRMKAAGYESYAEAAGAFLQESDYIPTQMETQNSIMKKRTGEVRLPSDHKMKKMSAININKNNFQNEIMDSEKTVLLDFWAPWCAPCRMVVPIVEEIASERRDIKVGKINVDEEPELANKFSIMSIPTLVVMKNGKIVQQVSGARPKNAILEMLMGFFDFFKQANINQGIEEYKRTAGAVLLDVRTPQEYQEGHIPESKNVPLQQLNNIVSVVKNTEIPLFVYCYSGARSRQATGMLQRMGYSKVNNIGGIAAYSGKVEKMKVIIVGGVAGGATAAARIRRLDEHAEITVFERSGYISYANCGLPYYIGDVITDPEELTLQTPESFFKRFRINMKIHHEVISIHPERKTVSVKNLENDEIFEENYDKLILSPGAKPTQPRLPGVGIDKLFTLRTVEDTFRIKEYINKNHPKSAVLAGGGFIGLELAENLRELGMDVTIVQRPKQLMNPFDPDMASMIHNEMRKYGIKLVLGYTVEGFKEKDNGVEVLLKDNPSLQADMVVLAIGVTPDTALAKEAGLELGIKGSIVVNDRMETSVPDIYAAGDAVQVKHYVTGDDALISLAGPANKQGRIIADNICGGDSRYLGSQGSSVIKVFDITAATTGINETNAKKSGLEVDTVILSPMSHAGYYPGGKVMTMKVVFEKDTYRLLGAQIIGYEGVDKRIDVLATAIHAGLKATQLKDLDLAYAPPYSSAKDPVNMAGFMIDNIAKGTLKQWHLEDMDKISKDKSVVLLDVRTVGEFNRGHMDGFKNIPVDELRERINEIEKGKPVYLICQSGLRSYIASRILEGNGYETYNFSGGFRFYDVVVNDRVLIERSYVCGMDYMSFENYFPLWNDLNTVQKKVISDNLITRDVKKGTIIHNGNLDCTGLLLVKSGQLRTYILSDEGREITLYRLFDMDMCLLSASCIMQSIQFEVTIEAEKDTDLWIIPAEIYKDIMKESAPVANYTNELMATRFSDVMWLIEQIMWKSLDKRVASFLLEETSIEETNELKITHETIANHLGSHREVITRMLRYFQGEGLVKLSRGKITILDSKKLETLQRSMQGDVSFTFLDRIEEVELNIVDRRWQSALALALTLPDICGGIAFPEIVKHYRDGRVMLDRKKNPTRDVGTQYIRWFDEYAGDYFKLSQFDEKPYICGERCWQLRCEYLHQNKGFLNDENNIRFHLGLNCGMSVCQLDSMNIQENGNDIRIDIEQFCLRMCKAAKSYYDKVHLEKDFSLYNTPVLDFIQVTQKKKAASIIALVCGSERYAKGLKEALQFISEQIMLFYTPESAKTKLDRHKPDLWIVTEDMTSQPNQPWRADRTTPVILITGNPDAVEIKKNSGKLTVLSMPLSIVDLRKTVEIYVSMLYIILLFVIVYLMMLMRRQKEKMSEIKIQIDQLQAQHDRLQKERDQLQERMNHLEEQREHLQMQTDQAFRSADEIEKICDEIWHHANTIHLYSSLAEEESKSITMKEKQKEIIRTTEEILNIIYKYKGNVMAKRVASVDKKRCVACGVCENTCPLAAAKVYHGCYAVVEETVCVGCGKCAKSCPAGCIEMKERTAMMKKKKHWYDYLWIWAILYFALGFFSILFAWFGMIDFLLPLGIAIFGGNKFFCNHLCGRGQLFSKLGGDLKCSRNKPTPRWMSSKWFRYGFLIFFLTMFGNMVFQTYLVGAGASSLREIIKLFWTFRVPWGWTYTAGTVADWVAQFSFGLYSLMLTSLLLGLIVMVLYKPRTWCTFCPMGTMTQGICKLKNNEKKMPRPVKCRKVCHFPNVLEFLPADDTDKKTPIVLTVDEYETIRLLDKKGYSQEQCAVSMQIARTTVQRIYEIARKKIADALIDGHPLRIEGGDFRICDGQSSDCSFGGCYKQEIYKKYAAEKGEGIMRIAVTYENGQIFQHFGHTETFKIYDVEEGKVVHSEVVDTNGSGHGALAGVLNALNADVLICGGIGGGAQTALAAAGIKLFGGVSGYADEAVEAFINETLEYNPDVKCSHHEHNHGEGHTCGEHGCGSHSCHMTTFGDKIRKLRKEKKMTQQKLGAMVGVSYRTIRAWEIDGRYPKQSSLYQKLADAFQCQVSYLMNDNETVCLGNDEPSEYSGAKQARQILEQAAALFASGTMTNEDKTIFMDEITRLYLEMVEETMFSGESKNIEYKVSLPDKSEKYMKTIVAFANTQGGKLIVGVDDKTHQIVGVENDVLFQLMDGIANAVSDSCVPQIIPDIEPQTVDGKTVIVVSVEAGKNRPYYLKSKGKDNGTYIRVAGTSRQAFPEKIKELEMEGARISWDELTCVGYPVSEEATEKLCQDIEKFRKKAGMAEHSVKKEQLINWKILKQSEGQLLATNAYALLTSDYFSFAKTQCAVFKGTDRAVFLDKREFTGPIYTQIEEAVDFVLRNIRLGATIDGLVRKEKYELPPEAIREMIINAHCHRNLLDESCIQVAVYDDRLEVTSPGGLYNGLTYEEVMNGHSKIRNKGIANIFSQMGLVEAWGSGIKRILNAAEEYGLPRPRFQEFDNMFRVEVFRNSFPMTNEKESIGEASEKHRRSIGEASEAEWRTDLNDTQQKIIKLLSEDHQLSAVKLAEKIGVASRNIENNIKKLKEYGILIRHGSPKNGYWEIVDKDLQEMARKTPKDGKEENIRVRVTPEQKQRLVEYAERHYQSMSGVVCQALDLLYAREEQQNNKEMKKTERIVSDRQKMKGKRVIAGILLAGILAVTLVGCKNTDNTKEETEKPVITLGSDNYPPYNYLNEDGVSTGIDVELATEAFKRMGYQVEVVQINWEKKKELVESGEIDCIMGCFSMEGRLDDYRWAGPYIASRQVVAVNENSEIYKLSDLEGKNLAVQSTTKPEDIFLNRTDERIPKLGNLISLGHRELIYTFLGKGYVDAAAAHEESIVQYMKDYDTSFRILEEPLMITGIGVAFAKDDDRGICEQMSQTLEEMRQDGTSLKIIGKYLDDPEKYLEVDDLGYMGIKRKKKEKRLQLFGALIGICVAVVSLFYFFHAEKAEAEKRMVEIVNYVKVQCSTYTHYNESTESKSLLRAIESARQMSTNIKTEKENGGHLSWEFLKENLQTLWVDGIIVLDTAGKTDCEYSTDESLANEITAYLQKEIIMDFAGYEERSYSERFARKDGSYIDIAACARKDAPGIVAIYYYTPPEFARNYTLTIQGLLNGYSIQKDGTIIVADEGIVVASNDESLLGQNTADNEVVQAMKKHTDSQHIHHLKNEGIGCYGIMLKQRDYYIYAYLPDTEVFHNLPLSVISVMFLYFLMFSIFWFWTYRNNLTHRKLEREKDEKYKEELLIAAKKAEAANRAKTEFLQRMSHDIRTPINGIRGMVNMADHYADDIEKQKEYRTKVKEASNLLLELVNDVLDMSKLESGEIVLEEVPFNLSSISEEVLVVIEQMAAKQNIRIMWEKKEIIHRNFIGSPGYVKRVMMNILSNAVKYNRENGHVYISCMEIPSEQPEMTMMEFVCRDTGVGMADEFQKHIFEPFAQEHAGSRTKFAGTGLGMPITKKLVEKMGGTITFESKKGIGTTFVIRIPFKIDMDSDKGKEQTDVSDEKSIKGLHILLTEDNELNMEIAEFMLQNEGADVEKAWNGQEAVELFKKSEPGEFDVILMDIMMPVMNGYEAAKMIRSLEREDAKKVPIIAMTANAFTEDRIRAKEAEMDEHVAKPVDVELLIKVIRKLVKYNMDKRQTILIVDDAEFNRDILKEILGENYNYLEAENGNQAIQMIGDNLEIDLMLLDINMPQMNGFEVLAIMKRSRCLEETPVIMISSEESVDTMRKAYEMGITDYITRPFDSVIVKKRVQNTLGLYANQKHLINVVYNQVYEKEENNSIMIRILSNVLGSRNSESRDHILHIKTVTELMLRQLVKITDAYPMTEVDIALITTASSLHDIGKIYIPEEILNKPGRLTDEEFKIMKTHSELGAEIIQNMNFPKDNPLVHTSWEICRWHHERWDGKGYPDGLKGEKIPISAQVVSIADVYDALTSERCYKKAFDHDTAIQMILDGQCGQFNPLLLKCLKELSFQLSKMLDKGMEDNEYYHEIQRLSNEILSDRSLPNQNYSQSVVKVMQEKIDFFKSNSGMNSIDYNAISGQLTILNGKQQIICQRNNPKIDLFKKFGVNEEDAQYVRVLLHQTSVQNKEISVQIKAVVENDGRMYKLKLHTLWSPLKKDGYIGIIGYVDSVKMQNSDYLISENPMKALVFFSLPMIIGNLFQQAYTMADSAIVGRLVGENALAAVGAAYSLTNIFICIAIGGGIGASVIVSQYFGRGSYGKLKKAVYTALISFLLISGLLGGFGLLFSRKIMIVLNTPAEVLDMSVTYLKIYFLGLPFLFMYNVLSSMFNALGKSRIPLYFLIFSSVFNIVLDWIFVANFHLDVAGVAWATLIAQGVSVVGSFTILLKELQTMEGNADGIFAKEELLPMTKIALPSILQQSTVSIGMMLVQSVVNSFGAEALAGFSAGMRIESICIVPMVAIGNAISSYTAQNIGAGQQKRVVKGYVQANKLVIFFAVLICVVLELFPEQLIALFLGTEGSSTALATGQAYIGFMGFFFCMIGFKMAVDGVLRGAGDMKMFTIANLVNLSIRVSMAMMLAPRFGIECIWYAVPIGWTANFVISYLEYRTGKWKTIKKIEKLLVSSFGCSPETADLEFSMTREMAKKNGMDKGDNLAFHLIQSFKPGEVDAETAHRLGQQFAMYMAFFSSAITTLKTLVVAIGAGLGVWGVVNLLEGYGNDNPGAKSQGIKQLMAGAGIMLLGTTLIPQLATLFSMNTIIERITEAIKDILIGLIKSCLDNMFTSVNEQVGTIAGQVGQTPQGWNMDKMDHNAHSVYLVYYHLIMVMKRVIGTIILIIAIICFGWSAFSLGKYAWQAHTTQKNIDQLADRINTDATEASDDSDDSDEEDPVAESEAMMEKYGDLYNENKDFIGWLSIEGTNINNPVMYTPDDPEHYLRKNFNGDYDIGGMLFVDSRCTFNPSSTDTIIYGHHMKNGTMFGPLMDFQDNDYLKEHSVVTFDTMYRPGTYKIFASFQSKAYDPDSEEFKYYDFINAETAYDFEEYLNNIKNLSLYYDEENAPSFGDEIITLSTCDYYTTDGRFAVLAKRIKMEEPLIIRRDEIIFKIGFYICLIALLCLIVSFAVISYNQWWHGSVYDESLIAEIFLWIFSFSIGGVPLGLLLIWDSYRHDYKLDENGITIRYRSSVFRTVRRWGECDCLGVECLIYPKITCSRDIGGSVLEISYTPEIWDKMSVYMARHGVKVLEPDLQQIWYKQQRKNSKSICALQDIQGELKISDQTFYGKKLNGGIKPLSAIVIALMLFGWYVILAFEYGSLLRYAWLLLIIAAIAGWIIYGEDAEWGNEWIVSRTGIQITTRRSKKVIFYEWSQINRVGVGSCGSEAAFFYIFFTANGKFKKMRVRFTEKRYKEFLAFVPEGKETDPMTSDYQIRWRSAMRSYGKSRDDFDEWMEKFYLGFDAGTQSVKVTVYNEKMECVASTSAPTTLTYPHPGWVDMDVDEYLALTINGMAECSRQMREKGLDPKQIQSIMGDGIICGIAGVDEEGNAITPYINYLDSRTQEDEVLINSWDLDIWGRETGNPEAKCMFPALFARWLLKNNEAFKARGAKFIHNAPYVLAHLAGLKAKDMFIDWGAMSGWGMGYKVEEKCWSPEQLKILGIEASMMPKIVKPWDIVGHLTEEMAEKTGLAAGTPICGGAGDTMQSMLGSGNMGAGQAVDVAGTCSMFCVSTKGIIPELSKKGAGLIFNSGTLPDTYFYWGYIRTGGLALRWFKDSVCGQEKDGDYFDVLNNAAKDVPAGSDGVLFLPYLTGGTNDVKEATGCFLNMTLDTDQATLWHAVLEAIGYDYMEITDLYRGAGVDMSRITITEGGSRSEIWNQMKSDMLGSEVITLKNAGGAVVTDCIVGAYALGHITDMKAALTESLEIKKLYYTNAENHDFYAKQYALQKKLVKQDMKEAFHTLKALHMYALNSLCEDSGLFFMKYEKENSDRILRRNFLMRLLIKCNLHEKNAVQSRRMSEQENILKLKAMIEASDNIVFFGGAGVSTESGIPDFRSETGIYNTVHKYGCSPEQILSHTFFMRKPEIFYDFYKSTMVYREAEPNEAHKALAKLEKIGKLKAVVTQNIDGLHQKAGSEKVYELHGTIMKNYCMKCGQFYDLDYVTASEDVPRCEKCGGIVKPDVVLYEEGLDDTTISKSVRAIAEADVLIIGGTSLNVYPAAGFINYYHGNKLVLINKSETPYDHEANLLIHDSIGKVLKACVADLMAILVVRIEDASTLLMNEFFDYNGRCYALTRSRKENTDVCINLEDFYEGTVQSESLEDIPVVFVKAQDGGWAVIGYYKRAEVRKKIMRPSLFLEGNIRADVREAWLFSENERKQIFAAHFGERYYEVVEDDDARYQPLMACMTDNLGQNSLLRYDCVDIFLQSTIRNQYEACLAECERLASALMCETCTDLREIKRLEVCGRQAAVLNGREADGYYYEAMADEQLGRVRQGMKAIEKALRIEPEGADLMALKGQLLVGMGKADAAAQWFHKAWYESGDDDYLMLEGRAWLLDEKPDDALDCFKKISDKGLLDAAGINLKDMEQRWPPVSARGVRGMTNPVVTITMTNGDVMKAELYPEIAPNTVNNFISLVQKGFYDGLIFHRVISGFMIQGGDPQGTGMGGPGYSIKGEFAMNGVRNDLKHTRGVLSMARSMMPNSAGSQFFIMHANAPHLDGQYAAFGKVVEGLDVVDKIASVRTGWQDKPVEEQKIQSMTVELFGETYPEPEKCMKNILRVFKNDLNKIHNNVIAMIVIMGILVIPTLYAWFNIAASWDPYGSTDGLKIAVASEDAGYASELINVDLNLGDDVIKALKENDNFNWVFTDADDAADGVKSGKYYASLVIPEDFTKDMMSVFTSDVTHPQIIYYINEKENAIAPKVTEKGASAVQQQVNDTFIETVSKTALEAIQLVSNAAADEDDQELADKLSKTLNQVAFDLSSAANTVQSFANLTKSGALMLDSTTEFLKQSGSGAENSVEAFDKAGEGIDSLNSALTGTTKTISDALAQNKEFYTAVSDAVGKALDSYNTDAEASADALYAVSDRIQDVIDRYTEIENSLTDIGNDFDSLKILNTAIRDINGLIDTAIARQTAIRDKINEAAGSLTTLTGDASDLKKEINDLIAQTTDSVEEVKTSYEENVKSGLNDLAGSLSSTDSSITSMFTALNDSVQDIAGVTDNASGDLSDVQKTLEDSVNLLKDASDKLTTASRKVSDSGSMDALTDLLEESPESMASFIASPVKLHENQIYPIENYGSAMAPFYSTLAIWVGAVVMAAMLKVTVSENAKKRLKNPKEHQLYFGRMILMVCLGILQSALICLGDLYFLGIQCEHPLMFIITGCFSSLIYVNIIYALTVSFGDIGKAVAVVLMVMQVAGSGGTFPIECAPKFFQVVYPLLPFVHSMNAMRECIAGFYGNYYMVEMAKMALYLIPSLLLGLLLRKPIVRLNEVFIEKLESTKLMMRNAFRIFRRDLKRILRNPAALLVIIGVSIIPSLYAWFNIVANIDPYANTSGIKVAVANNDQEASSNGLSINAGDEIITNLKENDQLGWTFVSEDEAVEGVRSGKYYAAIVIPDNFSESLLSVLSGKLNTPELEYYINEKANAIAPKITSTGASTIQSQINSTFSSVAAESVSDVVKNSVTDVADAVGNVNTDINEMLKKADANIQAYEDLLDKFNNSSDSTKDLISDAQKAAGSLDDAAASGASALDDADTIIQNTRTAAGDFSAILSWSLSNGELLLNQAHSSASEGLTELEAKAGKINTTVGDALDSANSVVSLNGEILNNMQDLVNQVNDEVDGQIANDIIDRLNSNIASLQEQNDKNQKLIDSLTVGNNSISDAISTTSTTREQLSGIASDSIGSIHAFRISMAQNVIPELDKTLDTFSSLTGELSGLLNGVPTASEQFQSVFNQLDTSLADIRDALSGTTSALASVSGKLNDIQSDVNALVSSDAYNKLLKLEGIDADQISEFMASPVELDTETYFAVKNYGSSMIPFYSNLAIWVGGIVLIAIIKMEVDRDKSMKNYTASEMYMGRWLLYVVIGIIQGFVVCLGDTLLPGAQVVHPVRMVILGMILSFVYVNIIYALSISFKHIGKALCVILVILQIPGSSGTYPIEMTPAFFQNLHPFLPFAYGVGAMRECVAGVYGHVYEKDILILLLCYVPISLLIGLGLRPALVGLNRLFDRKLSETEFMICEEPDETLSRHEQLRMILKASLSVDNLREETAAKAQAFEGNYKKMVRFGFLAIIIIPLIFLVLMFSLESKIVFLVLWILSIIIIAVWLIVVEFIHNNLQEQQKIAGMSFDEMLEKFRGKEKEMRILALDNCIYTQREMCYMSKTYLFSPIGNTDPIKYFYDGSMLHICRYYKPDVVILYLSHEMILHHEKDNRYVRSIELLGEKLGHTFEVRIIRDEQMVDVQQYDLFYHAFRGIIADIEEEMMPEDTLIVNMASGTPAMKSALLVMATLAEYRFLPIQVSTPKRRSNLEHEEREDYDVETNWELDEDNQPEAEKRCEEVRCMHLVQLLKMDMIKKHLQSYDYHAALQVGREIQRELGKEDYDWLEAADARAVLDWERMNRFLPKNNGVLWPVKAENQNRVLLEYTLSLDLKVKRGEYADFIRAITPLGVDLLERVIKQYCNIHIEDYYSSRDSQKWSRGKLANSEVLQILDRKFNDGFRYGPIYSYQLNTIVQAKCSDALMAQRVQELVNVEQKVRNLAAHSIVSATPEWVKERTGKSVDEIMWLIRYICEKVGIADSQESWRSYDRMNKKIIEKLDKTQLMSRLSSDENIFKGDFYEAEQEADMHAFGAEDEDYYFQIAENLEDDRQFILIIYDIVDNKRRTKFAKLLEGYGTRVQKSAFEAMLSQKSYEKLVREIPYYINPASGEDSVRIYRMIGKGRVKSWGDVPKQQEEIVLVMSLLYVNENGALIGIEGNKCVAKYKDGMKTFIPIESLEGITIMGQSQVTTKCMEECMMRGIPVTYFSKGGRYFGRLMSTGHVNVERQRKQSALYDTDFAVELGKKILSAKVKNQSVVLRRYEKSKHKNLEEEQKMMSICRNRILTSKKITEMIGFEGQAAKSYFQGLSKCIDEEFKFQGRSRRPPKDEFNSMISFGYSLLLNEVYCKIEMKGLNPYFGFIHRDAEKHPTLASDLMEEWRAVIVDATVMSLINGYEIKKEHFQTDLDQPGCYLTREGLKIFLNKLERKFRTEVRYLKYTDSAVSFRRAILLQMDRLAKAIEEGDASIYEPIIIRMKQILKTYNLELKVQGPVFVGNGEEIQKKEYVFLNGRHALGVVDIEKLYQLARKKGLASDMEQFMVRDTRITLRQWSDSHRIKPDELKACMKYIVDAGDMQQEKGRMQIMACIKDPYGKPYIPGSSIKGMLRTILLGAEMIQHPEKYEHLAENIQDDLYNGNERNRKKVLSRNISAIENQTFRTLNRPKSKPQDAVNDWMAGVIVSDSEPLSMKDVAVCQKWEQHVNGTEKTLNLMRECIRPGTVIRCQLTIDETISPLTGEKLMEVVKVFYQRYEKAFQQHFPYQSVAPISDATVFLGGGSGFVSKTIIYDLFQQKEAVRVTKDIFRKINVPREHKHDKDIGLGVSPHVLKCTKLNGKKYMMGQCELRLKEMQKMKYSIYQLDFYNGVRFGKGRLETTEMTFHADTLFAALFQEALKLEKEKIFLDAVRNGALRWSDAFPYKGRQLFLPKPMFQPPVKETQEQGNSIRKKQFKNMKYVPIEYIKAYMKGEYPEKHLEDCKEIGKEGVKTAVAVRGHEESEPYRVSAYYFNAGNGLYLILGSSGEAAEILFDDLMESLSYSGLGGKKSAGLGRFEYVKKTVPDMLGKALRSGSEGASGHFGQSASGEYAVLMSTALPEEEKLKDVLTDASYSLLKRSGFVDSTTFDDQQMRKKDLYVLAAGSCMKNVFDGCMVEEKNGGRHPVYRYAYGLFLEVNVMYAKVRISGDIEVKTGMHIGGSSAFSAIGAVDSPVILDVRSNLPMIPGSSLKGKMRSLLAKEFNEAIVEPDNDHERLTRLFGSAKKGNVKRSRVLFSDMVLDNEQELRDAGLQSMTEVKFENSINRTTAIANPRQIERVVRGSVFRLDLIYELENMDEFLEDMETLGEGMKLMQYDYLGGSGSRGYGKIRFEALEADVVVGQVDDDAMTKCREILKKAVEIMKTINETNYVDKAEKAIRSLRDKAEQQRRGRGELKIVTTSKIRNLLAMTADIYNQVMICQNDKLNDDLKGRIEYLRVRFMYECGREALVKNFVEEADILSILKEINGSKKNYILFSRYMEALIAFHKYYGGKDMTEEKVKLITGSLLHDIGKVIYRQGTDRRNHSTAGGDYLKDEVGITDRVVLDCVKYHHAAMLKGAALDDNSLAYIVYLADNIAAFADRRKKAESDEKGFELAVPLQSIFNILNGNHEEFYYQPGDMGDDNGINYPSAEKKKFSEAFYTKIRQRLTDNLKGLQWTEEYINSLMAVMEANLTYIPSSTAKSELADISLYDHVKLTAAIAACIYDYLNEKGLSYKAALFEHEKSFYDEKAFILYSMDVSGIQNFIYTITSKNALKTLRARSFYLEIMMEHIIDLFLEKAELSRANLIYSGGGHCYILLPNTEKTIAHIQDFQQEMKQWFLENYQTELYVATGYAACTANALRNMPDGSYSEIYRKLSMMISKQKQHRYEAADILWLNGRKMDDYTRECKVCKNIGHVNKEGVCTTCQKISDLSKNILYDKFFGVVKDETQEKGLPLLGDYSLIACHDEKDVRKKFMSDDALVRIYGKNALYTGKNIATKLWVGDYNTGDTFEQLAESAKGIKRIAVLRADVDNLGQAIVSGFDGKVSGLSRTATLSRHLSIFFKYFIRDILEHGEYNLSGETKVHRRNAAIIYSGGDDVFIVGAWNEVIELAVDLRNKFKRYTQGTLSLSAGIGMYGASYPIAVIAGETGVMEERSKYLPGKDAVTLLEDGESHEMMADNEEKSISDGTYQWDDFEDKVVAEKYRTLAAFFDTTEKRGRSFLYKILELIRQQERMLKGEGDKIGFARLVYLLTRLEPTKDGEEKEAYRHFSKCMYQWIQSPEDCRQLKTAINLYAYMNRMYAQLKLELEADDIDYKKSSNLQGILMENIDTEYAGILHGNQLNPYSQCLIRENGKNIWCIKTLTEEAYEQIIQPMSEVKSVVFKKSGRDVGVTKWQMDRCEERELLDEFYDTSCPKYLDIQFMSPTAFKQDGRYVIYPDLRLIYGSLMRKYSAVSGELDMIDEDLLNQLTDHSSITRYRLQTILFPMEKTNITGFVGNISIRVHGPETLARYVRLLLRFGEFSGVGIKTGMGMGAMRYNRREPKMDTSNLMEQILSSDNLNRAYLQVVRNKGAEGVDGMKYTELKEYLAKNGETIKEQLRMRKYKPQPVRRVEIPKPDGGVRNLGVPTVTDRFIQQAIAQVLTPIYEEQFHDHSYGFRPNRCAQQAILTALDIMNDGNDWIVDIDLEKFFDTVNHDKLMTLIGRTIEDGDVISIVRKYLVSGIMIDDEYEDSIVGTPQGGNLSPLLANIMLNELDKEMEKRGLNFVRYADDCIIMVGSEMSANRVMRNISRFIEEKLGLKVNMTKSKVDRPQGLKYLGFGFYFDSRAHQFKAKPHAKSVAKFKKRMKEFTSRSWGVSNSYKVEKLNQLIRGWINYFEIGSIKTLCKELDARIRYRLRMCIWKQWKTPQNRIKNLMKLEVDKDIAWITAYTGSRIAYVCQRRVMNFAINKERLTQFGLVSMIDYYTKRCVTCMVDMNHFVYYILHKAKKESTWDSFSTQVFINHAEDGSMKEDVINRCLTYVFVIIIATFLTKSQWGDSMADIVAENSTEQFVIVDADALQYVPLTFANVTDGNMEMNIASIGYSIATNDSVTFNIRTDIAETALYLYDRENGQVYYLNELNKFVFDSGEYEIKYFFPKCKIGIKNIMIVYDKLWTTLKEKNISQYTLINKYHVSAGQLSRLRTNANVSTHTLDMLCSILDCELSDIAEYRKNMKLFKSDNSLAFSQIYNAVSPVDRMSHLSLLITYGAQNHSCILSQMFCDNYALFSSDTIRSLIKWAARDIHRIDPLAKGIYVCPRTQGNAVQLDIDAPYYKITDLGLMPTDKYETGSHHRWYYWPINANMASVEKFTDAAVTNQLQHNAREIITNSNKDIDKARTHLNYSLTPERSLSPRAYYAARKKELYVYGRKDVKTMAGWIITAPKELSSKQEEQTFFQSVYNFLENRYGKENVIQATVHYDEGKKVKSVDRWGKVLTDDEGKPIYKIAVGRPHLHFDFIPVVADSNPKHHQSEKICANDVLNRQELQRFHADLQQHLIADGINCSVLTGITKANGRNYTVKELKANYEKQRELEHEYERSRWMFNTLLYLIPLMKPLVFITLITFIVYITITFPLKGKPSDHVTTSSILQSAPPDNAHGVIFGKEKGAVFFSPVNNEGHIAVFGGSGSGKTSGLLIPTLRSWTGTSLVIDISGDISSNCNIHNKLIFEPANLHSIPFNIFDAIDRTTDINEKNEKLEHLAYMLMPDSERMDDNAKFFLTEGRKILAAALIAFYHQGKDFIQICEFIMGHSFQKVFSAIDASRCEMAIQYINSFEGANERNTAGCKQAADNAVKLFATNNKIKKVVRRPAKQELSFSAASAENSNVFVIIDDVQLELYAPLVHVITAQCLDYFSSRSAECKHSILFALDEFASFGKLDITAALRKLRKKHVRIMILTQSMADIDLIYGRAERMAMMNNFQFKVVLGVSDTDTQEYFAKLIGNKIIQNHSISRNAKSVTRTYTDTKEYAIEPAELAHLKNELLILYPDGYIRLRKNYYFLMSIRICEIVTNLKNDKGEDLINLDNMKDFLVNRECIMKYAYIVHDKDTYSLEDEAKNEQHKAGTLKSPHIHLLLKFRCPQQIGNVAKWFNIKPNCVQKVKSEVAATAYLIHANAPQKYQYELSEVISNFDVAQAIQKLQTKRSLNDVIDKILNGTICEYNKTTEIAPVMLVQQNKKIEMAFKVRAEHLLATKKDRNTECIFISGTSGSGKTTLAKRIATDKKLAYYVSSGSNDILDGYMQQPVLILDDIRPSTLGLSDLLKLLDNNTASTVKSRYKNKALYCDLIIITTVLDIDSFYSTVFKNSDEPIMQLKRRCGTYIKMDSEHIYISLWDSYKNDYSEPLEYENDVINIYRADHAKTTQEIEENVSSLIPFLKRTDTPHDGFMKIPDNIDLPFDMSINIHDALQILSTIKGLSDYQALTELENLANLKPMQDVLNDIEDMNREYYLKRHPYQIYYSESDKRWRTYLPDSTKKNGRKPITSTKRENLENKIVKYYEDCAKAIAVPADTIALLYPEFLAYKTKETSPANANKINWAWEKYYKNDKLVNRRLGELTVPELKEWFLDKIADYQLTTRKYRDMKALMNMLYDYAISLGLVTYNVSRNIKNISYKKFTPERKKSVTEQIYIDDEETRLVELAYKKFEETHNTAYLAIILNCSLGLRVGELVALKRSDFNFNTNTVHIQRQERKLYDPETLKRSGFEVVPYTKSLNSDRVLILTSVAQQAYKMIVKHNMENQFFSEYLLLNNDGVRINNDTINRLLRQLNKELGTVQKSNHNLRKTCLSNMNASHLLSDEEIRMFAGHKDIATTQNSYIFATGSLNTRSEAYEKAIDSKINNVFKRVQMIKKILSLVDQKLLRFIIVGCINTVVGTAIMFGLYNLASCSYWVSSAANYILTSILSFFLNKYFTFQNKERSWKQVAKFIINIAVCYVLAYGIAKPVVMYILSGAGQKIQENAAMLAGMCLFTGFNYIGQRMFAFKEMIVYFIRHGETDFNKRCLIQGMSDIPLNDKGIQQAGIAAEWFEKQNITFDRVFASPLVRARKTAAIVSGRTFEEVQPDARIREMDFGVDEGKPYSLIKDLFDAPESYIPPEGAESIEELQTRAQKFLDMLSEMAASDESVHTVLAASHGAALRGIMSCINHCELKDFWRSGLSNCCVYKIHLENNVWVEDGLMHPIEEAEQFKSGKTKEAMNREFKDALEDSPVIAAIKDDNGLKECLKSDIQVVFILYGDICNIADIVDTVKQAGKMALVHLDLINGLSAKDVAVDFIKKYTKADGIISTKPALIKHAGEIGLTSVLRLFVIDSMAYENIQKHVKGARPDVIEVLPALMPKVVKRVCRISQIPVIAGGLVSDKEDVMSLLQAGVVSVSSTNKEIWFMSKGKKYENPKTIRKYEKKLAKLQRQLVHKEKRSQNYNKIKKKIALCHEKITNSRKDYLHKISHEIISENQVIVSENLQIQNMVKDHHLAKAISDVSWYELTRQLEYKAKWNGRKYIKIDTFYASSQLCSVCGYQNTETKDLSIREWSCPVCGAKHDRDINAAKNXXXXTARIYACGDSRSRGLGKYYVSILVETEHVELPHTDQNTGIDLGIKDLCITSKGKKYENPKTIRKYEKKLAKLQRQLPNGWETYSELPTQRFQHQYFDDTNLIKNMVFDLDVPTIGAVPGPGFHWDSAFLSDVTICTEDTVMEVMLKAYKYRIYPTNEQKEQIAKTFGCCMISKERLRKIIYNNTIFDTATDLNTHYDKHNASIQKDVDRAISSGKMVKAEVSPIGLTMSDTADENIENVPDNITLKYTDGTEYVIDGEDAYNTIVSLKDSGKSWYVFNRLVDTGKIQSLDIKGHYCNFEDESQENYDRIYTIAEMFENIKPTDTTIEVALPFYIMSQISNIFYYANIKDKGLTMYDEKFGLALARKKPEIRSQYFKIQKTWHEKWITKYPDVPETDEYITHDKINKKLSYDFETYGYCKTNISEDDIWHLVDTLLYNKESDPDVIRAKENEINVHRKSEAMYGDDMETRELTCIGCPLGCALTVTMNGKEVVEVKGNTCKKGDIYARKEVTNPTRIVTTTVRVSGGAAPMINVKTQSDIPKDKIFECVAALKGVTIQAPVAIGDVVLENVAGTGVNIVAAGAVEAAMKAYDLIIIGGGPAGLAAAVAARDNGIESILILERDKQLGGILNQCIHNGFGLHTFKEELTGPEYAARFIEQVKERKIEYKLNTMVMDISHEKVVTAMNREEGMILLQAKAVILAMGCRERSRGALNIPGYRPAGIYSAGTAQRLVNMEGYMPGREVVILGSGDIGLIMARRMTLEGAKVKVVAELMPYSGGLKRNIVQCLNDFDIPLKLSHTVVDIEGKDRVKAVTIAEVGPDRRPIPGTEERYECDTLLLSCGLIPENELSKSAGVDLSPITSGPIVNDSLETNIDGVFACGNVLHVHDLVDYVSQEAGTAGKNAAAYIKEGKTADAKTVEILPVDGVRYTVPKYIRPTEMEDTLTVRFRVGDVYKNCAIATYFDDELISKRKRPVMAPGEMEQVILQKSKLADYPDLKHITIKIEEAMYDVAIIGAGVTGSAIARELSRYQLNVCVIEREEDVCCGTSKANSAIIHAGFDAVPGTLKAKVNVKGNAMMDQIAKELDIPFKRNGSMVVCTKDQDPKGLEVLMERGKANGVPDLQILDREALIAMEPNLSDDVVCALFAPTGGIVCPFHMTMGYAENACSNGVEFFLNTQVDDIKKAESGYELTVTHTDSGEKEIKTAKVVINAAGVYADTLNNMVSEHKLHITARKGEYMLLDKDAGKHVSHTIFQLPSKMGKGVLVSPTVHGNLLVGPTAVDVEDKEAVNTTQAGLDSLGRTASLSVKNVPLRQVITSFAGLRAHEAGDDFVIGEAEDAKGFINVAGIESPGLSSAPAIAVMVADRVKEMLNPEVNDKFNPIRKGILHPDTLTLEERNELIKKQPAYGNIICRCEMITEGEILDAIHRPLGARSLDGVKRRTRAGMGRCQAGFCSPRTMEILEREVPMSMFDITKNGVGSNIVIGTNKELMEEPLIRTLEEQIAEKIKNYRKGTGVYDAEHVDRWISQFPEEERMVVLTETNRLLEQNYVDQAKLMEWERYIETNVDIMGADPQKTISKSQFLDIQTKGNSQKRLVPMVESYLQACGYTGVNTCAPGEVANYFYLDDCLFTGMTLLKDVGHWLETENPNPGSTLKIIYIAGYNGALPYVKKRLEEICAPKHIKAEIHLMREYKNDMRQPQPYDILWPRQVKGDPYVDQYMAHLEELKASSGRSGIGFRKGYSDGESELFTSGYNRYVLEQALMKKGAYICSLSENGNDKMKPMGYKHDISLGFGAFFATDYNISNNCPLAFWWGSTEKTGTVLEQWYPLLPREVNVKTMPIEYIQDAEKVPEELCEKLKGMHYSSFSFEQRQWAIEPLIKNGAWNFVGVMRVEEQVFLCLPKSVSVRNGESQEEKEQRLLKYARLLEQYFQEVKKCSEDINFVPIYPWCVDTLVSWCEIRNPWSREQKDVGVIAAVKFEKVFEWLIGWLYRNQLHLSGNDVLYDSFILRREDLHINHPAYNIYEWEPVNKRKEDRTLENRRIIFEDMEKKNIPDIVIDMSAGDQELCCILDAKYSGWKDNGYKLPGNMDIYKQFFYQEQIKRIYENTVLKRTDKTEVYNFLVLPDYIGDTKDGITRYCAKIKFYYHEDREMGVIQVNLENLITAFLEEDEGEQERQRGYLKMFCARTNPFLGMIKILFICHGNICRSPISEYVLKDMVEKRGLTDAFEIASAATSTEEIWNGKGNPIYPPAQAELRRHGIGETAYTNFSGKRARQVTKQDYQYYDYLLCADSNNIRNTLRITGPDKEGKVKLLLDFTDRPGRSIADPWYTGGFEETYRDVYEGCTALLEALEKMGLFDIFKKKSEETSTPKTSGKVEVKFSPITTYQDEVVPVEKRIRGKKPTCDGLYPHEVLVLSYAPRYCDNANEYPRFWWSSYGIKDVTSILRSLQQKGFITVGDIFDAINMEKLSVIKEELKKRDLKVTGKKADLISRLVENADETELARVFTRRPFSLTADGETIVKKYEWIPYIHSHGIDGLDIWNLTDMVQTPPYLKFRDKIWGHFNTISMKYAEEGNWGLYRNVRFQMSEFVAEEGKIENALHLLCEVVSHDLSGLTNGFKMEYLYIYAEGFFPYENSSIKMAPGITERINKYSDMLGLSREQLREIILNEMKRRNNPLQLFAPEECADIVLYEIDKNTGELAKLYAIAEKRFQKKYKNQLKRPWMASSKEYLQFILEQLSDLEEINYRAMMGEYIIYYQGRIVGGIYDDRLLVKPTKSAVSYMATATYELPYEGAKEMLLVEDVDSKEYLTGLFNAMYDELPVHKANNKIMKFMEYIKVTNENIDKEHICCAISNNNDIQVSSKKEWLKEQFREGLVFLKRAERGKCFIEYLPAENAWNPITADGYMYIDCLWVAGSFKGHGYGADLLDACMEDSKNKGKKGLCILSSGKKKPFLSDPKFLWYKGFKVCDEADNGIQLWYLPFAAEAPLPEFKECARYPHIEEKGYVLYYTSQCPFNAKYVPIVEEVARENGVSFRAIHLQSKEEAQNAPTPVTTYALFYDGAYLTNEQMNDRKFLKLLSKMESKEKNTKEKILEEALKLFAQSGYMGTSMNDIASKLGVTKAALYKHYKSKQEILDSIIEKMNELDIARVKQYEMPEGDLEKVTAEYKETAFDKIKQYLASGPLTYMEALFSGMLGDAGKARQTALDFYGPIFLLYSIYDGTENKSHVIKLLEEHMDHFLQEMQIRMRTVLALMNRNRKLFFKDKGMLFTAMITPVILIVLYATFLAKVFKDSFTAAIPDMITISDKLINGTVAAQLTASLMAVSCITVTFCVNLTMVQDKANGTRKDFDVSPVSKGKIYWGYFLSTVANSLMVNGIAFVLCLGYLLKMGWYMNAADVLWVLFDMILLVLFGSTLSSIISFPLTTQGQLSAVGTIVSAGYGFICGAYMPISNFGSGLQKALSYLPSTYATSLIKNHMLHGVFREMERKHYPAEMVEAIRDTLDCNPVFHGKVVSVNQMIGIMMGSIAVFGIIYYFVTLLPEGKADDTIKVTKRMRKEQTSHKNEHNTLMCFPLEPVFTRDKRRLPNFIDEPTTGLDPQTRQLIWNVIEKLQKTENMTVFLTTHYMEEAVNAGYVVILDKGSVAAEGTPFELKNDYVQDIVSVYGVSEDEIKTLNREYKKIRDGYQIKVKNTKEATELIVEHQDLFMDYEVVKGGMDDVFLAVTGKKLGGEHMNKYDMMIACNRKTSEEKINRAVTEIRQMLTDREKVTVPKLVKRTGLSRGFFYKNETVRKEMDRVLEQQAGMIDPKRYIGDIVMKNRIELLEQQVRELKREKEQLEKENIRLQKALNKKDLNLLKNLMENRFYIKELDSYQKASDLSKERMGTNPNYDLELLPTKQMQEEMWEFLQYRGKNLVAEKFYTERRFYHHLCRMLKEKNNRPESFLDWDKEKWMQQMKIWLLQQGLSLTAPFKNKCGGRGTQRARTLGYIECLIDYLTDLRDADVNEITKDVWKIEKLDIQVKQDLIRPRKTISFTGISQPELKEEIKKAVYFQLRIESLETVKKELTAIRRFSRYLNEHKKNVKSCADFDRTIIEEYLVYMKTEDTGTKRYRSEITRLRSILNIVADIYQYPQAKDLILNRDIPPNIRSEFKVYSDAELKRFNEFLAKVDIQTARVMTIHQMLGTRISDTLTLRTDCLMEQNGEILIRIYQMKTHYYEKPISQELAALIREAIRYTEERYGKCKYIFTNENDHTKPMTYSLIQGRITTAIYRENLRDDNGNYFTFGTHMYRHVYGVKLVEMHLDDWTIARLLGHKSLKNVKYYRKMSNQILANDTRKARNRLSQMVLECLDGWEEEYEQIRYDDSLMPARLYAFVPEEQNLSNAEREQLIEGLERELDEYYEQKCGKGSLETYLIQNEIWHLSEINYQVRAGYQKYLREYYVDSTVRNYLLGIDRVKLRLIIENAQTLKGKWNAQNHPELLHDILFLRYHPNPAIAKRYEYTTDISKLVWDFRVKGSDICKQQILTVLEDIVQQKITMKECTRHLNGLKSVYEFCMQEQIEDLRYLTQKQFDKIENYGDTDYKKKCAKQELRACQEYIFCHAKNIAWDSTVWFMERLYLEEYRVNPSNPVKTISFMSIERTDNRELVQEYIKYCLGVTHLALSVIHTEFYRIQKFVVWLEETTEINLKQVSENEIKKYFQIIDYKVASYFNDIIIAIYQFYEYLQTKNIIKEVPFNYQYYLKKEILHHNDRSVEQETYESILKHLKDFPEKPRLILLHSMLLGLRISEVCCLKGNAYYWQGRDAWIQVYQIKMRTYKRIPIPEILYKIMKVYIKKYRIGAEDYIFQNQKGKAYHYSSFRWSMKKIFNENHELFQEYNFKSHDFRHTIATMFYEDGVPLQSVRDYLGHDYEEMTQQYVDYMPKRISRANQELFAKEGSSLASGIKRCKRGKMKRYKVETQREGSVKYFFIRDMESLEIVLLPSKYLMHQVRANRSPNTIRRNAFALAYYWEYLLENEKKAEDIYEMDYETQYDYFAEYLKWLKAGKHTDNLENGPQNKTCNAYLKEVFRFYCFLEAVRNNGSYLSVLSYNQPITRANAIGVRRTLRSRSFKGYLKEEERDVRAAEKNEIITILEACTNCRDQVLILLTSELGFRIGEILGIDYTKDIDYETHEIRVNFREDNENDARAKNAEERRGRLSNDTFEFLLYYIGEYWDILQKQEYLFINIKGDTTGKPMKVDSVYDMFERMEKKTGIKITPHMLRRYYANTRWESDWPLEMISQALGHKHLDTTIRYLNVLDDKLRTASQEFYRRYSNLYNVNQFLESRRMYYTKEYLKRAHREIDTIFRVLFPEHGMAVREEQIMLCHEMLDNLLGRNIALCDAGVGIGKTYAYLVACVLMRKYSLLAEGCSPYEQRPVVISTSSITLQKAILTEYIPFLSRILQENGTIQAPIKAVIRKGKEHFVCDERLEQRIVAIEEKNKNALQKEALLSLKEHYDMDEVSNLSGFDRRMVSVPKFCSGDCPKRGSCRYQQYLERSRDHEMFIQICNHNYLLADGYHRLQDYRPLLKDYRALIVDEAHKLPDAAKQMFGKSLCYDDIREICFYLGNEYQGPEIRKLSGTIRMVLDIIGENHRTRYGIKEEFHMTEECAMYLYEGIQTMNKIIEKLEKKIPKWIRNKLEETKSVLECFFHQDKKYVLHLKQDHDHRIILCASSRRIPQYLDQMLWSRGMGAILTSGTLKTGQGFSHIRKMTGLQRVRRVREYVADSPFEYQKNCLLYLPKNLKKCRRGSQEEAEMIAGHIHSLICSTYGHTLVLFTSYHLMGNVYQMLRDEIPFPMIEVWRHSPEEITRFKQMDNAVLFAAGSCWEGVDFPGDMVSSLIIVKLPFAVPDPISEAQKKEYASLKDYIQAVIVPDMQKKLRQGFGRALRTETDTCVVSILDERAGEGGRYHEEVMCALPSCKMAKDIKDIQHFIRNRKGVEYYLMAYNKTSEERKWNYWKEQEEKKLRELGMEEEKIQKLRQMDREDFLEERRYREHLDEMMQDMDSIKQRDRGRFAQDIRELLDNIGDRRIYELLKGTEHQTLEILLLSTWGYSGREIAKIMGMAEQTVYTKRNRLRKKLNNLSKIEMHQWKSLKKQKSKGKRSAVIEEVAAFFYSTFFEHYNVHIRSPPCSDLISIPKIRSEESMKKVLIAADEVDKWSQLCEGLKNEWECTTVNLDVFEKFHTIAVYDAVLMLVRNDNGKLGRLIWEVRQYSRAPIIVVIPGIQAVKKYIEWGADLVFPHPSVSLINTYLYALLRRSDITWNTGRKREKQEIIRKGKLLIDCRYHTVYWGKHELATLNEREKAFLYLLADASRQVVTHEIIFEQLWKEPYGDDSANMIWCFVRRLRKKMEKTEPEAAKIIQSIRKVGYYLDIDRYMKIGESKEDYLEAAYVLKRQKGYVRNSMLSDYLNYSKASVSVAVRGLLADGYVIKDRYGSIELTEEGRKIAKKIYARHVLLEEFLRRIGVSSETANHDACRMEHTINEESYKKIQELVRKMKEENTLNEEMKLTNMSENTNITKRRSALQIMGSLIGLVKPLLHIMLAAIILGTLGYLCAIFLTILAGQVIVHGLLTGVAGMIVPVDNMWLVFTPVKTIITVMIVIAVLRGILHYVEQYCNHFIAFKLLAIIRHKVFAALRKLCPAKLEGRDKGNLISIITTDIELLEVFYAHTISPIAIATLTSIIMVIFIGRYHWLAGVLALAAYLIVGVAIPMWNGKRGSQKGMEFRTNFGELNSFVLDSLRGLDETIQYGQGEKRKEQMSERSKNLAGMQESLSKMEGSQRSFTNMVILLASFGMLALTIWLYDKGTMGFEGILTCTIAMMGSFGPVVALSSLSNNLNQTLASGERVLSLLEETPLVEEIPGDVETEHEFTGAEAENVTFAYGEEVILDNYSLKLQPGKITGIHGASGSGKSTLLKLLMRFWDVQDGSVSVDGTDVRKIPTKHLRDMESYVTQETHLFHDSIANNIAIAKPGASREEIMEAAKKASIHDFIMTLPKGYDTEVGELGDTLSGGEKQRIGIARAFLHECPLILLDEPTSNLDSLNEGIILKSLKESAKKKTVVLVSHRVSTMNVADVVYEMENGRISMNGMAASDKIFKILDLPEPQAGEKTLPEVALDVTLKDVHFSYEEDREILKGIGLNLPAGSFVSLVGESGCGKSTIAGILAAKNRGYNGEITIGGVPLNEVNETNLMQRVVLVRHNSYLFKGTVEENLKMAKPDATKEEMEAVLQKVNLLGFLQTQDGLQTQLLEKASNLSGGQCQRLVIARALLRTDSAVYIFDEAASNIDVESEELIMNVIHELAKTKTVLLISHRLANVVKSDKIYFLKDGEIKESGKHDELMSRNGAYRHLYESQMVLENYGKGGVAMIKTRLVGLLSHAKKYIVYTILWQWAALLSQVLAVFSIADLLERVVYRAVTVPIIERTILILVLVVVIRFICERMGARSSYLACVDVKRILREKIYEKMLKLGASYSEQVSSSEVVQVSTEGVEQLETYFGKYLPQLFYSLIAPLTLFIILCRVSLKASVILLICVPLIPISIVVVQKVAKRLLNNYWSIYTGLGDSFLENLQGLTTLKIYQADQQKADEMDVESQNFRKIXXXXGADHAAQFHKRDGYCCLWWSCDRYGSRGVRILKRKYQCGRNVMYRSACQRVFPAAQTAWFILPYRNEWYGSEMMDKVEKKRQKEQHVVEEMIRLYCRKKHPKEDRQAGQICPVCQELLDYARLRSEKCPFMKEKTFCANCKVHCYKPEVREQIRQVMRFSGPRMLIYHPVLAVWHLICSKKESKKMKNPLKVVWIVLGFLCLGLGTIGIVLPILPTVPFYMATLFCFAKSSKKLHDWFVGTNLYKKHLDSFVQKRAMTIGTKCKIIGMVTVVMAIGFICMKNVPIGRICIAVVWVCHLLYFFLRVKTLKVGEELPEGAEVEMRSKEKNMDLTSTENEAAKKVKKADKWADKPAMEVRDLHFSYGKNKVLKGVSLKIEEGKITTIMGANGCGKSTLFSLMTKNLYPRKGNIFLKGKNIQNLNLKEFARKVAIVQQYNSASDDITVENLVAFGRTPHKKMMQGDSAEDERMIQWALEVTNLTEYRDREVSRLSGGQRQRVWIAMALCQGTKTLFLDEPTTYLDIRYQIEILQLVKKLNQEFGITIIMVLHDINQAIAYSDNVIGMKDGKVLVEGDPEEVITEESIRELYGIELGVTRVDGRKFVLAVMKETELKNTSETSEMEVQSLSGQDKARKHRKTAKAAISFIVMIVLLVALFFAAVNIGSLKVSFPELLKGLFVKYNEDVATIYDLRFPRIVISMLAGAAIAVSGVLFQAVLKNPLADPGIIGISSGASFAAVLITAFAPTLFFFTPLFAFLGGVIAFVLVYSLSWKGGLSPLRIILVGVAVDAMFTGLSSALNSMNGGNMSGVAAIVNGNITMKTWDDVKTLVPYVIVGLVLALIMTKMCNLLALEDKTARSLGINVNAMRIVISLIAVLLASISTAVAGVISFLGLIVPHIGRILVGSDHKALVPFSALFGAFTFLLADTIGRTIAAPYEVSASIIMSVVGGPFFIILLRRSKKYAKMMNRRLKKASAVLLAMTMIFSLAGCVDQSQGKKSSDSATQTESSTDETDSSKTADKKTSDSKSDKDSSDEDAKSLLEIDDPEEKAAVEAAKKKVQAMKESPRIIATSPATADICDKLELDLVGVCSSTVSTIPDRYKDVETVGTAMSPDMEIVSSLNPDWILSPVSLQSDLQPKYEAIDTDWAFLNLRSVPGMYRSIQELGEIFDREDQAQKLVDEFTEFYDDYKKKNEGKDHPKVMILMGLPGSYIIATPNSYVGSLVELAGGENVYSDTDQEFLTVNTEDMKTKEPDIILRAAHALPDQVVEMFNKDFSENDIWQHFDAVKNGRVYDLTYEYFGMSATFKYPQALEELQPILYPESDEDSAKAKETSDNAQKKAKDSDATEKYNEQQSKMKLAAKKNKILSAIMTCVLAITLMAGFPAVKAYAASGTVYSCAINRCYAHPVTGVIEDSGGESSYATGQGMVEGCVYSNGILEVTDDGAYYLTIRMSLMDYTSGHSFQVQNVGDSGWSTPSEIGITGNGSDSNGTTADVCMRVPSENCIVRGEMYVEPMGRNVIFYLYPSDYSEGNNTDMNATMVTESSNGTAAESGGSGSVDNSGSTSSGNSSLGSGNSSLQSSGSSDKSSSSSSSKKLESSITEAAKPSSDSSSLDTENPVNSSEGLSLSTAKDGTSDSDSDSGNTSSGNRIFQIALAVVVTGLILLGAVSGVIYFFRKNWKRWGGAEDDDEMKKIKKILAFVLSTSMLLGGMNIQAFAGEQKETNTANTELDNQNEYVVPLTFYGPSGKLLTEEPYSGTVQDYMDNVALVKKNDNGTYHVTLQIENYEKIDILQFSKPGVISDDIAPSNAPMGTFNIPEKYIANNEENPSEATEYLKEQGQINEEWNDKYIQNYSVEKATTGVSWYSFDVDTLEGTMYTKAFYSYGRTDDDLESYMYGIVNGKFTFDVNNAVVAKEINEENYKNIGLELSKVVTSVGDSPDFTGFVAEEKTANDLFSGTCEAKIENGKVTVTAETSSIDSIRVLEEIKDLGECTYPSTSSYRQYMYAYSREVKKNKYISVYSDNILEDGKFSIEYENLEEAIFGKQVEIQTEDGTYYGELRVRTTPKEKLELTDGDVTLVTDNYTVNSKAKFGAELLQETSDEDSEYNKYYSLLAGNASKALIYNLSLKMNDSQVIPSRAVELRVKIPKDWDTSKIEVQWYYPVNEMFNPIEYFDSSSYKNDDGSIHMEGDELVITGTTRVYNTIAITQKADKVDISEIQDGTYNVNVTMWQQDQPDRLSMSNSAVVNDSARLVVENGKKHIYFDTQGIVITGRYGYTNGIFWANNEQTEENGLPILSEYTPLDYYSYYLNDSGSTDMDSYAEEYDLYYPKSVGFEFPESADRDDGVYLNFFVPIMDELQHKVPGSGEGCRTAFMTLSGLTPVAEINEPTHDKSVLVVAVDKASKYTADNYTEESYKVLSDAVAKAQKVIDGTTSANDSEIVALDKEISDAISGLKEATGLDKYNKVLKNAKALNEADYTAESWADLQAVITAQEGKVTEENADQASADLQSAVDALVPMSTAVSMEKGVYEVQATLTNQDGTASDLNAGLKSARLYTDKDGNVTAYLYVDGITGMQYRKGAGYADADTDAGRLVVKLPANVENHKVKVTTESGEAELLLNLDLKSAVKQEIKKSDLESKLNDAKVLEEKNYTSDSFAALTDAIATAESVQADKVAFQSEITAAETALDTATAGLVMKEEVKARAELDQAVSDAKNNYAEANYTKDSYENLKSAIKEAEEVLAKSDATADEMKEQVDKLDKAVKALVRLDDAVDKSELNGYIENALTKKNDGTYTDNSWNSFQAAIKSAQKVSADVNATKAEVEKQTKLLTSSYEALVVKNKQSDLFKDYPQIFEGTYSVPIKMLNATSDEDSMGNASMVQTGIVRVTGKGEVTLEMNFQSMQFAGMTGYLYKLKKVDMDTVEYNKYNYPVKYEASDATVLEEYTDVYDSFNNKNSEYYDKNTEGNWYPKKLSIPIELNDNLFYVEVYVPVMESIGEGQGTKVARVSIDWANIKQETGVERDNSVIEALLNQVSGMQQGDVADEYWNALNAAYMTAQDVYNDMNSTQKEIDLQVTALQAAVDAVETQIVDKTELNALIEKATAEANRTDVVYTSATLEALQTAITNAQAVAAKEDATKAEVQAQVTALQTALDSLRVVDKTNLNALIEKAKAEVAKTDVYESNSLTVLNTAITLAENVAANPKATELEVAAAEKSLTTALNGLVEKEVVDKSKLESKIAEAKTYLSQTDIYTESSLATLQSAVGRAQNVMDNDSASQKLVDDQVTKLTEAIQQLAKKSDGKLDIKNLADGVYSIYGTMVKVDKNTYSMSNEAINHTIKLTVKNGKYYITLNFNGLTVGQKLGYLSQLKYFKTGYTPDKYGNPQGTLADVTVDSYQKNSDGSLVSDQYGTNYPDEVTFELIPEALDDGYVPLQVFVPIMDAISSGTGTQPVFLKLDWSSLKATTSDDPDFDKNDNNNSNSNGNNNSNSSIGNSSLGNNTLGSSSLGSSKLGSSSLGSGSSSLKSGTSSLGSGSSLKSASNVKTGDVVQNNTLWAAILLLGGVALLAGIMEYNRKKKANVKMRKIKKLVATLLAATMVMAMGVTAFAADSLADGKYTAKQNLYKNSACTTTSMGDAALNDMRAEITIADDEATLVVHTHEITYLGLTGHLGKMVVNGKTVTPKQTTTNGVTDYYFTFTGLDASTIYEGCVITGKFTTYVGSMPMNATGYLKLTDITAKMEKGEHLKRQNRPTMLQLQYLQGLSRVEKKRGAQGIIAESYGVNRSTVNRYFKNCIERGILTESLEFTAAGEEWLERYTKLYENLEKYLEEIGAKPEEIEESLDVMVENIDTHMLELMINAYTEKKSVYKKKENELDQEIQHNLQKCERHPVVFRLYRMNKKQGQGRDSMAMRGFEEIAEIVQENGESYLELKLKEMAAHSRVSGEMMAGKLKTLKYEHNEVLEEARIENNIVKIPMEACRIHRWTGIGTMGIVPVTVTCSVGPMHMPESTALLYFWVMGRKIENRNIDVTKARGELEEDLLEYVYRAWRQGRQITSKEYAREVNITGYEAAGLVRSLVKKGFLCEPENGHLELSDKGKLEGMECLARHEKLTQFFQMVSGMDQQRAQEDACRVEHYISPEGLKGIENFLQYGDVYDRVYDDMDLYTFYEDGEFPMAFGLYEPERRNPRFLAPEYGKLEHSVILRVKKSQNCFLLKTKKDESIGYVWYRRDDEWIQAKEEKGVYQLPTDICTYTANTGIPITEAVAIIAITRFEQKPLPIDYRELNIHVWMETKKVAKEYMQKDILRTIFQMRKRQEDDKQIKRIIVLDYDLTEYHWKTNIKKLQEEGFLETDSDAKIPALTESGTEYARQLQRAAEGWNQFLKMSGVNEKTADRDGRLMACEVSDPDKIDNLWKFINDGGRSSIPKSVDCHTLWKKLKPGKYQMWYSFYTTEIGKERKAAIEDMRFERDGWLHIEPWEIWLELTEHPENEDDRTIWYQNMHGIWKKAEENDHSIKIPATAFHIEYEQQWLGEIHFTCNLGFVAEKKKGSKKKTICLLDGRLLQKIPDIVMKKKSSYRWLIWIILAVVLIGVALMHILPPYIDRWKSARDYDKLAEEYVNDESEPDDGKQKKKDWWATDVKVEFDKLKAENPDVIGWIRFDNQDELGINYPILYSGDNEKYLRTDLHGNSHIAGCIFLEGLNKSDFSDYYNIIYGHNMNDGSMFGSLKKYKDDGFWKKNQYFTVYSETTAYRYRIFSYEDAVNGGDVYKVGYQPGEEYQKFIDQMIKDSDVDTGVNPQTSNKILTLSTCTGNGYSKRLAIHAVCVDTQTTDESKLKETGNMNQQEIFTYIQKQYPTHPDTINKSGYPVTIFKNPRTAAPYAIFYQPAERTTFMEVQAEPDMIGNYIEMYHLAPAKYMGKKHWLAVPLDGSVSDSKVLDLLDMSYDLVDGQAEADGETGADRQIGADGQEIDSTPEEKDMQKKNCVLCISIGIIVCILLSACSKQPDFDAKSYVQSSLDAYYHGEYKDYANLLEISEKDAKKEIEEDFNESIQQQFDDSDNITDKGIADYAEKLAEVKKLAKYKVQDVKEEDGVYTVSVQVEPSNVFQTLQQSSTEVSKEKIAQGMKETDPGVFASVLTESVQKSLEKNSYGKTVTVKVSVEKDNSGKYGLSDTEMNKLEAAMFPTEMRRKIIIVIVVVVLVIVATITFFVIKDLQQEKSLRKEIDEIQKEMVDFEQIDVDKISKKLKATVTTGDYAKIEKAIKNYMADNLNTMLTISEALNDEVIPNALTAENYQNDGPDFVKTRKILKNTQDKLSASKETMIILSKDDTVMSYLKNVDDSYYIDLYKEMVGEESSVDDIKKNIDDIVNLIQSQQNVLEFLSENKNMWNVQNGKIQFDDDILLNQYNQLLLAVQMELNINSPSYFTKQYGVIDEIYSMCRGISKHVENKQYSDLVDIVGITPIIAPKDIIEQGLFKQEKKCDIKYGFASVSLWIDYDEYLKADITDKQIMIVKNILASIKTISRKAKIDYKQFCEDIFQYCKLINLPIESNLKVMLDKKQYTAENRLAVVKQGGTVLMAAMYDGDNNRVFELDNTYKWEDCYGDEVLIPANQRTEDGNSPKEQLASLVKGGSNAKGYTLTEYINDINRENTEVLAEYGADEKVRQAYTYGESGIGERVSVDKSEESSYYLYDGRNSVTGILTETANLTNSYQYDSYGNLTSGTADGVNYYGYNGESTNVKTGLQYLRARYYDAENGTFTTEDSDLGTTENPLTRNRYDYTTNNPLNYSDPTGHSLWSRIKSTAKKAAKAVKSVGKKIVNTAKKVVKTVVNTAKKAAKTIVNAVKGAAKTVKNAVTHPKKTYQSVRSSVTNSYRKVVSRGSSFVRSVSNGVQKIGKTYTSFKSYVSERTSEIRSEVVRHMCTTTNRITDQLGKVNWKNVAIGVTAMVVSGVVVAATGGLATGAVLAALPAMGGLGTAMVSGAVAGAIGGASYGAISSGLSGNSLKQVAKDTLTGGLTGAISGGVLGGLTYGAGKALSAVKDLVKGKSSSTKPGHITEMATKKLDYTSENEAPLLTQTDQSSASKVTARNNSASISDNNIESVAAGNNTTKSTTASKQGNNVKTATTNTAENNAEATSGYYKDNNGRWHRKNGQFASNEEVGIPSKKTSASHNHGNSLEDTRTNYGYALVDKDTNEILKFGETLNPEKRYSQKYLNENNAVMKVIESGSKRDIHMWQYDMNKYYESKYGEFPPLLKSKGWMSMSKTIFRELLDKEASPALGCTEPMMFALAGAIMLMNTFMKYASKEYVYMPPTCSCATTAAPAAAAGVAFLHGLTPQQINDMLCTAQVQMAGVVCDGAKPSCATRMYVALFGSLQAMMMAKEGIRATNVEGFVHNDLKVTLENLYRLQHDVLHNKVDAILWDIVKEQKVIHKGSNNYYRQKKRVALCHEKIRNQRKDFLHKLSYEMAEAYDVVAVEDIDMKAMSQCMHFGKSVMDNSYGKFRELLEYKLTWRGKKLVYTTNVVNGNIQVEDHRIKLPKLKWIRMKKHREIAEKYCLKSVTISMEPSGKYYASMNIAYRFRIYPNREQEVLLAKTFGCCCFLYNQMLNDKIREYEAMKKMLRNTPAVYKKAYPFLKEVDSLALANVQMHLEKAALANVQMHLEKAYKNFFRNPKIGFPKIKSKHRSRKSYTTNVVNGNIQVEDHRIKLPKLKWIRHINVTDNDDMEQWDAVIMGNDELLEKYMSGKPFKMSELEQEENRRFQNGTLFPVYHGSAKNNLGIRQLIEVIASKFYSSTPEGQSELCGQVFKIEYSEKRRRFVYVRIYSGTLHLRDVIKKSVYKKKENELDQEIQHNLQKCERHPVVFRLYRMNKKQGQGRDSMAMRGFEEIAEIVQENGESYLELKLKEMMKIINLGILAHVDAGKTTLTESLLYTSGAIAEPGSVDKGTTRTDTMNLERQRGITIQTAVTSFQWEDVKVNIIDTPGHMDFLAEVYRSLSVLDGAVLLVSAKDGIQAQTRILFHALQTMKIPTIFFINKIDQEGIDLPMVYQEMKAKLSSEIIVKQKVGQHPHINVTDNDDMEQWDAVIMGNDELLEKIASLYNCEIEIIDNTEKSEQQELVEDLVQIITVFSCKLQGKRANKAKKLIRELMQQEETDGKSHKSNVDTKQRTENSKGKKYENPKTIRKYEKKLAKLQRQLAHKKKRSQNYNKIKKKIALCHEKITNSRKDYLHKISHEIISENQVIVSENLQIQNMVKDHHLAKAISDVSWYELTRQLEYKAKWNGRKYIKIDTFYASSQLCSVCGYQNTEGTTRTDTMNLERQRGITIQTAVTSFQWEDVKVNIIDTPGHMDFLAEVYRSLSVLDGAVLLVSAKDGIQAQTRILFHALQHREIAEKYCLKSVTISMEPSGKYYASLLYEKSDCENQAEEFDYEDAKILGIDYAMHGMAVFSEDIQKENEGYFRKSEERLAREQRKLSHCVKGSNNYYRQKKYMNPRISFDGLNWWISVCVEFPDCKETFNDDGVGIDLGIKDLAVCSDAVKYKNINKSQKVKKLEMTPVIKEPLLGYHPCDARFLTSCREPAGGQCQCDPEAEYSALVQALHGQVVRVSPVSDQYINPMDLNLNYSEEDNPLSLKADFILSLCELIVGGKNGLEPVEKTIIDMEEVILYISCQREQRETVQIHKQFENNLLEKIKKLLTNTMVTGFATIPVKSGETKRVYYDNSGAMVYGEYKCNDNKWHYFNTASGKMVTGFATIPVKITADFDGGKVKLPKLKEVKAKLHRNFIGQIKSATVSQMPSGKYYVSILVETEHVELPHTDQNTGIDNIFQVQGIAQKYNCSLKQLDYQQEAALMSCIPLGVNRIEIQRGLTTSSTAIFVPFTTQELFQEGEALYYGKQKQRLKFAYEETGASVKNDKDMEKLNQMDTDGVNFRHQKQKEKAKKFSYEEARKMFLFSGGCPSAYIKQSLFIHSTSGNGGKPVKKIPASATVLPTMKVEVQSPYNRISISHNRKGHKAFAVFLLSFLVGKCRRTIIGVKCRSPPFNLDFYVFKDSDMAYNNGREDRKWRIWKEAEEKVLREHGVDEATIEQIRIDDRADFNSNRRFYHWTSDFGEYLEGMADREQSAEVKTVEDLLDEIEDENLYQALLTVDRRTLQIVLLKMKGYSTKEIAPLVHLTTGAIYARLDHLRKKLRKILMSFVMQCGGFFIYPKVKGNKIQNGGGKDIGFPFRRVKAGIKKAVTQKNALRSCPQRMSREKSEKVCITFRLSEEEHEKLKQYSSACGLSTAEFMRQLCRGNAPQPQPEKEFWELLGTLYEVHVAFKKCIPYAPSADEICREIEDFILELQRNYTLPQQFDMEKLTEQGAVMAATSLWHIEGRLKDLISYVENPEKTVPNKEMQDFFDVFSYVKNPQKTDNGEFVSAINCLKETALQQMILTKKQYQKTGGYIAWHGYQSFKPDEVTPEQCHEIGLKLAREMWGDKYQIIVVTHLDRGHLHNHFCFNSVSYLDGSKYNYSKSEQKRLRETSDRLCREYGLSVIENPKKAPSRPLYLDEKSGKPTRYNVYLEDLAEAISGSRDIPHMMKYLIDKGYEVDFSGGHWKMKLPQYKHFTRLDTLDECLTPDFIRSHLGTRARYGNYKAKISYSPHMPEEYKKAWKPHQKTRGILALYYYWCYQLGIFPKGTDYKPTSPLMKEELRKLDEITTQVRYMSEHNISTLSDLHADREKNQTEMDRLTNYRRHLQNKIRRASPAEKETLREEKNGVTERITELRKRLKYADGIEKRSAHIDDCLNQIHDTVENQRSNQNGRTDRKREDALRMSRLTEQELTEILDENKGISMVNPNRVYPPLPPAENIMPLMRIPEQATLCEKIGGTEYTVTAHFREDGRDLLGLLSRIFMRDTADYSFDSEGYDEDMQRQQEEITALYCRLSQDDGREGESNSIVNQKEYLFKYAKEHGFPNPTYYVDDGYTGTNFAGVRMLQSNKITALYCRLSQEDMQAGESGSIQHQKMILQRYADEHHFLNTKFFVDDGFSGVSFEREGLQAMLQEVEAGRVATVITKDLSRLGRNYLKTGELIEIVFPENGVRYIAINDGVDTAREDNEFTPLRNWFNEFYARDTSKKIRAVKQAQAQKGERVNGEYPYGYIPDPNNRHHLIPDPETAPIVKQVFAMFVSGVRMCEIQKWLAENKVLTIGALRYQRTGQARYQRAMIAPYTWPDKTLYDILARQEYLGHTITAKTHKVSYKSKKTRKNEEEQRYFFPNTHEPLVDEETFELAQKRIATRHRPTKAAEIDIFSGLLFCAGCRHKMYYQQGVNIEPRKFSYSCGAWRNRARTGSECTSHYIRKNVLLDLVLEDMRRVLRYVKEHEQDFICKATEYGDMEARKALAQQQKELFKAQARMTELDTLFRKLYEDNALGRLTDERFVFLTSGYEDEKKSLAARIDELQQQIATVTERKRDISRFIQIVGKYSDIQELTYENVHEFIDRILIHELDRETNTRKIEIHYSFVGQVDTEQEPTQVVNHDRRNMVDVKSIAIMDKKQTITTERKIGKITYLVQALPSEKATDTIHKKIEKLIVKDLQKKPGNPGFLASEMGYLSFRKSISAVDVLLQADKAYCSLTKKAAFGAQHNRQTGTFRLYRASRRVRHDSFSPMMNTVRKSENLLPFPVISAAANGDTTAMCAILKHYEGYIAKLCTRTLKDDAGNTYSYVDEEMRNRLQVRLITRTLAFHVGMELSSSDKERIQHQYDALAKKTLVGEAKSHRRTLAKRAAREVTFSDLSESELAQLFTTDEYESDYFRFQVSGFDVLVKNELLAEALNALPERKRDIILLSYFLDMSDAEIGELLNVVRTTVFRHRKSALAKIKQYLEGKADDEYRMKRLPKYTPAEVRNDPYGFTYKEMSEVIGENEAKALYEELYKQLPRKKNLSMLVKNICKSSDTEKYVYELKDNKYIETVFIKRRDGGTVCVSTQVGCPVGCIFCESGRNGFVRNLTSSEIVQQIILLRRKVNRIVFMGMGEPLFNYDNLIKAIHILRDRYGLNFPTDGITISTVGPVDQLKKLREEHLKIQLTISLHAATQSARNRIIPHMRIYAIEDVVKQALSYSERHNRKIVFAYLLLPGINDRPSDVRQLAKWFRGKKVMINVLQYNPTSNSRIKAPQKREIVAFKHQLEQAGLEVTMRVSHGREINAACGQLANTYNKFKKKMLKKYWIKCPICNGKTRVQVFHNTVLKDFPLFCPKCKLTHIIDVEKLEIVIKNTEKQTFIIMKMAKRPVPLYDFKAFGAAIKAARNEYGESRKKVSDELYISPRYLANIENKGQQPSLQVFYDLVTRYHISVDQFFFPNSNAEKSTGRRQLDALLDGMSDKGIRIVTATAREITEVEKAEDMENRKRNIQMKFYVTEEEKRLIDEKMKQLPIKQYGAYFRKMAIDGYILVVDRSDTKAYIRELQAVSRNINQIAKRANATGTVYRQDIEDIKKAVDEIWRLQRRTLLNQPMAVTKTHPIKSTLKAAIDYILNPEKTDGKLLASSFGCGLETADIEFAWTREAAGDRGTHLGRHLIQSFAVGETTPEEAHKIGMELAGAVLGGKYEFVLTTHVDKDHLHNHLIFNAVSFVDYKKYHSNKQSYHFIRRTSDRICKEHRLQMYKIAICDDDKRYRKTIREIIEHENSLPENEIRFYEYESGNELLKHTDILHELVFIDIRMPGLDGNQTALKLRNYNKDAVLIFYSSYFEPTVDSINFGQPFRYIMKDLHDTSLRREIAAIMTEVKRRFLNDYAVTVTSAGKIIRIHVENILYVSRAKRGCEITIVKEQEKETVRCREAFGELCEQLKDQGFAQAHYSYIVKLGKVEGLEKGVLRLKCGIELNVSRAKKEEFTEALFEYLRERNGMDMKTAVIYRLEELIRQKDITVNEAAIRSGVPPSTLKNILYGQSKNVGVVTIKKLCDGLEITIPEFFGDSIFAELEPELMTTWLPAFFVLVKMLNYLPRKYTKLTKMYLCSKRLYMGDLLRAIYIEMARNMITGKETQKMQEFTQEQIDRAEHMGIALPVDVKEQIFEYANLIGEEEKVRTLVRNLTDAINQADEDKVEELLDDAKMDIQDLPDPTIGKLELRDYGYTAEDMVPLRKEAALDYHRMGSKIYCLGSDGDKGEEYASKEMIQAHEGLFGMELQMWERIRDQDLDYADEDFGAFQEPMSVIEQEEALKLYDAGADIYLITNFSSPIYVTERKEIERGPEHYQMSMAERERFRNLEWEMQKYPQIQSLKEANLLLGTRRTFGIYQIKDDLTGENYAFMNMSFIESHGMQIKKEDYKLVYVGELLGNTSLDDIFERFNIDRPKDFRGHSLSVSDIVVLNDGEKVTAHFVDSISFEQLDSFLNLEEQILSELAYEVGERYFAIQRTEEGYDYSFYDEDFRLMDGGVYENDEISIEEAAEELLEDEGWTGERICGDYDQLMEKVKEMDEVVMAEIQKSQGEYKPLAKVEELEEANYNMIDNVLNNMPLKKEPYLEYFATECDEFHDMGAYEKSTDVNQIAAVYEKYKENPETAYLGCSMGIIYRDPEDSYYDEAEFAIVKGNTVLGNLMDDVQFYGELALVREGIEKIHEALPDYKYVPMRDVREAMYPEKMTTEQLAEALDEIAEAFDPYEYRDNVEMGENTIQEVMLDLRSGNIHYYVSYLKDIVDEKCDLSVRAGVLLERLKAYEPELPKDIEPMVYVNYCEKSDLGNPRCQKLSDLDSKTVEQDKAWYADLDPNTNEPKTTAQMFFTVYYAEKGDKMLHHFQGKIEIGTGNGGIISQLKMQNEMKLTDESWISYQQGKGNEEYQKYMEDLTDMQNHVLPYLQSFCSLEEKGVQERREQKIAEKNESRETVPRTGVEANTAVKDAGKAERKTVEQKKAMARKEKKPSIHERLEINKRIIQEKQGKDKPARGADLSVRTVMANKLYAMEQLTEEVAKDVAASPQEWMRFLNTASRLYKYTFPEQLLIYAQRPEATAVASMEIWNQKMYRWIKKGSKGIALIDNTSGPKTKLRYVFDVQDTYKVRNLGKDPQLWNLPVEGEQLVADYLQEQLSLEDTEGGLAESLHQAAKESMQEWLPDALEELRLDVTGTFLEELDEQNQEVEFRELMTNSVWYVLLNRCGLDAQEYLDAEDFRHITDFNQLIVLGHLGSAVNEISRPVLMQIGRYVLNNLENDLKTVAKEKEVVYNEFNTLMRENSTNKTEDREENKEETDYERDHLQPERRVSDSRYQPGRDERNHREVWNDEERVSEKSQGSKVQHSDSAEPSGQSSDGDRQSGKTESRQPDERTSGERSGTGQDGRHNGVDQTHEPDQSTGRGTGDSGDYLQLSLFPTEEEQLGEIRKAAAALEQPAAFLISDEVVDDILRTGSGQKNTLFHITARLIEGLDNEEMQSFLKDEYRTGGKGFTIDGQKISIWYDNDGIRIRRGDSARRNFDRIVTWEEAADRIRDMYEEGNYVDNLISNNAIEQEQKEMTDLLALHFRDTSRNREERLSYSDWQDVVGAAWTDSEEAAATAYRFEWLQEDMEKNPEDYHRWEIQHNPEYFQRYKDLQRERSWVDQQFKVERPALSFITQDEIDAVLRRGGITAGGRNRIYEYFMEHHDMKDAAEFLKNEYGTGGSSPGIPGADASDASHDAKGLKLGKGKIGNPEVEVLLKWNKVAKRVRQLIRTDDYLSPEEMEKYEERQEAQRLADLEEAQQMLGEQLEQDTFTAEDITDLRLVDSEYMSGTRTKIYDFACKVKGEENRLQYTLEYHDDGEGFTIHTEKDDIWERMSTQELERLDVKLGQEVLYYHYHNKTVNADTLDKLREIKEEIMEEESSYFTAISKRVWTDYDKKEKELSGEVEVSEEKESLEEINGIAELIPATNFHITDDELGQGTPKEKFRANIMAIQLLKKCEDENRNATPEEQEILSRYVGWGGLADAFDETKSAWETEYLELKTVLTPEEYAAARASTLNAHYTQPIVIESMYQVLENLGFTKGNILEPSMGVGNFFGKLPENLNQSKLYGVELDSISGRIAKLLYPDANIQIKGFEKTDYPNDFFDVAIGNVPFGAYKVNDRQYDRYNFMIHDYFLAKTIDQLRPGGVAALITTKGTMDKASPEVRKYLAERADLLGAIRLPNTAFKANAGTEVSADILFFQKRESFTKEMPDWVNLESDAKGITINKYFVQHPGMILGEMKEVSGPYGMETTCAPMEGAVLELQLQEAVKHIKGSMVAAVDIEAELDEMPESIPADPNVRNYSYTVVDDQVYYRVNSLMNQVKMPAATAERVKGMVAIRDTVRELIAMQMEEFVTDEEIQKQQEKLNQVYDTYTAKYGVIGSNANKRAFSDDSSYCLLCSLEDLNEDGTLKRKADMFTKRTIKKAVAVTSVETATEALALSLNERAKVDLPYMAQLTGKTEEKITEELVGVIFKNPLTDQWESGDEYLSGNVRDKLNTARTFAENHPEFTSNVRALEAVQPRDLEASEIEVRIGATWIEPSDYQDFMQETLHTPWYLLQKEIQVKFSEVNGEWRITGKNADSPKNAFAYATYGTERANAYKILEDTLNLKDVRIYDKSVNENGDEIRVLNKKETMLASQKQDAMKAAFKDWIFKDQQRRERLVKVYNERFNSIRPREYDGSHLTFPGMNPEIELRPHQKNAVAHQLYGENVLLAHVVGAGKTYEMVAAAMESKRLGLSQKNLFVVPNHLTEQWGAEFLQLYPGANILVATKKDFEPANRKKFCARIAMGNYDAIIIGHSQFERIPISDERQEAMLRKQIDDLEMAIQSARYEQDGGRYTVKQIEKTRKTLQTRLEKLNQKEKKDQVVTFEELGVDHLYVDEAHSYKNAFLYTKMRNVAGIAQNEAQKSADMFNKCQYLDEITGGKGITFATGTPISNSMTELYVMQRYLQNSKLQNMGLGLFDSWASTFGEVVTSIELAPEGTGYRAKSRFARFYNIPELMNMFKEIADIKTSDQLKLPVPEAEYETVVLKPTEQQKEIVESLGERAEVVRNGGVDASVDNMLKITNDGRKLALDQRLVNELLPDNPESKISVCAEKSYEIWKDTAAQKSAQLIFCDLSTPKGDGSFNVYDDLKQKLIEKGVPEKEIAFIHDANTEAKKTELFGKVKSGQVRFLIGSTAKMGAGTNVQDRLIALHHLDIGWKPSDLEQREGRIIRQGNHNKKVHIFRYVTESTFDSYMWQLIENKQKFISQIMTSKAPVRSCEDVDEAALSYAEVKALATGNPAVKEKMALDVDVAKLKLLKANHMNNQYRLEDDIARNFPQQIAKLIEIIDSYKADIAHFSEHKITDPEQFSMKISGKVFTEKKEAGMALLAVCQDIKSVDAAMDIGSYQGFNMRIQFDSWRKEFILSVKHESVAKVRLGADALGNITRINNLLESYPEKLAEAEQRLETVQEQMTNAKEEVGKPFPKEEELSQKLERLSELNALLNMDEREDTETEQSESKEKEERPARGSIHEKLQIYKEKSQRESETGKETRKRDFGLEMMNRKEFYEYVKDNVKEYLPESYKDAEIKLQEVEKNNGLKLTGITIPNGDQRIVPTVYLDSLYQEYIHGKDVDSCVSDVADMRIEAQGKAEFFDMGVPDILDYEKMKDKLQMRICDKEWNTDLLADKVVTEHGDFAAYYAVNLEENGEGISSIPVTVSLMNEWGVSAEQIQADAMVADRKRGVTLMDMNEIIKSMIFGEEPENLLNEKMDMEAMENPMFCLTNKAKMNGASLLLQEDIRKQIGECLGSDYFVIPSSIHEVLILPDNGIFQVPELNAMVQEVNETKVERQEQLSDKVQFCDGKTAVMENAERREARLEKEKAAEKAEVKGGIHGRLEKAKAEIKAKEGDKVPKNKSKELATALMMKTMVKRQEAKKNQEKTLKRMMAYQKKAEQMVSRKRVNHHMIRKGMKKKGNFRKVVSGLLAGMTMLSTVLSPMTAYAAEIQPEKKPPLYEDVKDLLDEDEVVTAKDYEIETGSVFDVKSDYTGLEIKDDNKVKVTFEEAKNDKDEDFTTDHADTYKAVYYVEPVNQEHPKYQISRKLIVREKATEAQTEVAGSEAVTESEKAVSEQQTEEAEDSEADSEVTDIDADEFDDLVEQAQNQDTYDEESGLELHDVLEQAGDEGVDLDSMEEGEIATFEAVSAYSARSTQQVTIEKGSLYRYADYNLGTYLTEPYYISYGSVRAIAYCVQPAKPGPGSGNYTITKIGDNQALAKVCYYGTDAAGSESFFANKYTDFSEGKRFIIIHMAASYANGSSDAFYGTNATGEALAKELYNYCVNKPEIPDVAMSFSKPNVKAYVDGNVQRTENIQFNASSQQKITMDLPKGVKLHNVSTGTVSAAGASVTIGGGTTFYLSAPLTQTKDVSATFSAKMKGSITKDYSAYKLTTNASVQDLAFVFGEGVADEKYVSLKVSWIEQATIEIVKKDDTADVNLAGAVFGIYSDESCTKLITQMPATDKNGKSSVTIIKTQDTVYLKEIIAPQGYVVNATATNVKLVASKTSAVTVENKEQLAELTIYKEGQVLTGAEVSENGTVFQYENRRQKNAVYNVYAGADIVTAYGTKVYSKGDLVKENLTTGENGSVTLKNLHLGCYVVKEAKAPDNFYNGSEEKPVTLTYAGQNKEVVFADVTFNNERQKADVSVVKQDKDTKKPLNGGIFALYASDDIRNADGTVVVKKGTLIEKATTGADGTAKFTADLPIGYSYSVKEDQAPEGYVRNTEDVYTFKFSYTNDKEATVSFAHTFSNDRVTAKINLFKVDKETGKAVPQGDATLKGAVYGLYAREDIVHPDGATGTIYKAGEQVASLTTDDKGQASVNGLYLGKYYIKEITPPTGYLADTEEHDLTCSYEGDMTAEVKRECTSSEQVIKQPFQIIKAANNGKTDADLLSGAGFTVYLKSSLTKKADGSYDFDSAKPVVSGENGATEIFTDEKGYACSIPLPFGSYIVRETTTPHNYKPVDDFEVNITEHHPNEPQIWRVLLDEEFKAKLKIVKKDDETKKSVLIAGTEFKVYDLDNKKYVEQVTTYPVTTTHKSYFTDSQGYLIMPKNLKIGHYRIEEVNAPEGYTINKNYVEIAVDANTAYQMDSESGDAIITVDYENHPVKGKLTIYKKGEMLTGFKKDFVYEERYLKGASFHVYAAENIYTPDYQKDENGNRQLIYAKDALVTTVTTGEDGKAVADNLPLGSYYVVEKTAPEGFVLNHDRSDVAFVYADQDTPVIEQEVTVGDDRQKVVIQVEKQDAENGATVAGAVFGIYNKADIKADGKVIVKADTLLQEMTSDNDGLATCTLDLPLGQYYVKELKAPAGFVSSDEVLNLDASYQGQDVKTVKLKTVKKNQPTTVEITKSDVTTGVELDGAKLTVLDKEGNVVDQWTSVKDQPHVIKRLTVGEEYTLREEMAPYGYLKAMDVKFTLEDRAEIQKVEMKDEVPTGLLIINKNGEFLDKITLLDHVKGTVEHLFEYVTGSLSDVTFDVFAAEDIKAADGVSEDYFKADEKVGTITTDSNGIAQMGDLPAGKYYVKEVKTAHGYVLDKEPRYVDLSYRDQDTPVITYDEKWQNARQKVKVTVLKKEKDTDRVLAGGVFGLYTSEDIKNAKGEVLLEKDSLIEQRVTDEKGQIIFTADLPVDGKYYVKEIFAPDGFVTTEEVQEFTFEYAGEDQAEVSYDFTFENQPTTVELSKTDLTTGKELPGAHLKVTDSDGNTVDEWTSTEESHVIKELVVGKKYTMTETKPADGYVTAESITFTVENTAEVQKHEMKDDVTKVEISKTDITGETEIPGAKLTILDKDDQVVESWTSTEEAHYIEKLPIGKYTLREEQAPKGYILTSDVSFEVKDTGEIQKVAMKDDTAKGKVILNKTDKSSGEPLKGVEFELRDSKGKVLETLKTDAAGHAESKLYEIATFKNGKYDTAIKYYLVETKTLDGYTLDQTKHEVTFAYADDSTPVVEVTFNLTNEKPEVPETPKTLDTPQSHEETKVSNAPKTGDSTNIWLPILLLVISTGGMAGLYIRKKKNRKMAHIKFDDMDAVTEHFQKKEDADRVAADCMERMCEVEKDDVKEKTVRPPKLYDLTTLQREANRMFGYTAQQTLDAVQEMYEQKLVTYPRTDSQYLTDEMGESTETLIQMLLGKMPYAEGLEYQPDVSKVLNSKKVSDHHAIIPTMEVAKADIGKLKERNCKILYLISARVLTATADPYIYESHKCQITCNYHTFYLTAKKTKQEGFKSIENKLKQFFGVKSEKEEPELDIWDGKHYGPCDSFVSEHFTQPPKQYTEDTLLSAMERAGNEELTEDTEKKGLGTPATRAAIIEKLIQSGFVKREKKNLVPTDDGNVLITVLPDEIKSPKMTAEWEMALNHIAQNTETADEFLNGITELMQELVARYQGISEEKKEQFQGKAKGEVIGKCPRCGADVREGKVNFYCSDRNCAFALWKNDKFLASQGKKMDKAAAKKFLSKGKIHYKDLLSRKTGRQYEATVEMVDLGEGNVQFNLSFPQRMKLVIAEKPSVAMALASVLGARTRKDGYVEGNGYIVSWCVGHLVGLCDASEYDEKYKKWRYEDLPIVPECWRHKILEGTKKQFGILKKLMRDSKVDEVICATDAGREGELIFRLVYEQAGCKKPMKRLWISSMEEQAIKDGFASLKDGSCYDSLYQSALCRAKADWLVGINASRLFSXXXXESWKSTDTNTCHDRGSKSEDQGIYQRKILYGSYQVMMNLEKMKQKKRTITKSRVKKSLLAATTFLCLTTPLLQTQTAYAAENTTPAITIEKPDGWKQGETTIAVTVDASHMPEGFSIAKIEAKAGKDGSWQDVTGSGSITITGNQTVYVRVTDGEGKVYEQNRSIKCYDTEKPTLSASLTDGVLTIQGNDTVSGITAVTVNGTTYTDLKDGMLRVQLTQKDFTTKQIEITVTDGAGNTSEKYVLQNPYYEWAKKQAEKQKSSSDSNGAMATTTSADAMGTEKTTTSPLPQDAQASEPTDAKGTVDDRTVTGIEKQLNKEGETAESVTKTATEGTKEFYTISTKSGKIFYLIIDNSKSQDNVYFLTEVSEKDLMNFTLSDSVTLPEVDTVYAEPEKKAEEEKPETTESAEKDKVEDDIQMPEDKSPFGTYLLIALVAVGAAAGGYYFKVYKPKHEYDDEDEMEEDEDESEDSESEKREVDDADEQEESAEPEILRDEDFNDDVLEDEEEEQEMKSLEKATADYEKAKEKMEASKARYEADLKRFKAAEIAKTEAENLEIVRIIRAMDMSIPELEAFKKRMKNELPGRVEIQKEETKADDESGKNETEEENNYMFAEQYHLTTEAVNETVTETATVRVGESLGQVVTSGYCNCPICCGIWSGGPTASGAYPTANHTLAVDASNPFVPMGTKVVMNGVEYTVEDTGAFARYGVQFDVYYDNHAAASAHGHQTWECYLADDNGSQEVEVTRTRDVDVLNVTLNSGNLMSICQDRLGFFQKELFSAYNDTKGNLQMFATPVDFNWYSSVTSYYGYRIHPISGANQLHNGMDIGAPEGTKVMAGLTGTVTTSAYNDSYGNYVIIKDRKGYELRYAHLSSRSVSAGASVTKGDEIGLVGNTGNSTGSHLHIELLKNGERLNPIFYLETGEGAGFGGNEYTSEAAQRLLNEAARYLGTPYVWGGYSPSGFDCSGFVSYCLTNSGVRNTGRLTAQGLYNICTPVSQSEAQPGDLIFFTGTYDAGEPVTHIGIYVGNGQMIHCGHPVQYTSINSPYWQSHFYGFGRWMAEQRMKVRDKKVQKMTKDGLVEENLTDKSSVRVSNRASDVQMGRKQGEKEENLVDKSPRQSERSGKNIRPSVQKSRDAPELIRTEKQSGDFGQSSKQQNRKRIRAEVGKESRLAEKSEVGQLGRLKDKRADLSENRGDSRRNQTGGSKKPKQKQRLKFAYEETGASVKNDKDMEKLNQMDTDGVNFRHQKQKEKAKKFSYEEARKRKEAKQHSKKAQVYQANEGESPGKKKSRLKFGEGESVKTEKASVVKKAGSATSVALHREISKNEDDNAAVEGAHKLEEGGEGIYRLEQRSARRRKQRASRKRSRLERQVEKQTQAAARQEQKKLKKQIQKQQIKRDYAKAKRSEQTVGTAAKGTIDYIKKIGGKVTNFFKENRKVYISVAVLIGLMFLIITNVTSCSAVFLQNVITYTGTSYLSSDQAIREAEXXXXXXXXXXXXXXXXXXXXXXXXXXXXXXXXXXXXXRNTDITSDLLSMIRLSMLRAISYVLTFSGGAVFGIAFLCLLQAGKGYPKKEEMLQDGICQVTKTFFSKTIQFYDINYQLALNEDKTTIFENYCDFLNYFDSSISVQLSFINQQVDVAEFEKSIDIPDQNDDFNAIREEYRTMLKNQLSKGNNGLVKTKYITFGIEAENLKVARPRLERIETDILNNFKVLGAQAHSLNGLERLEILYHVFNQDRIEPFKFQYKMLPETGLKTKDFIAPTSFNFSKNQTFLMGRTMGSVSYLQILAPELTDRMLADFLDVDDSINVNIHIQSIDQSSAIKMIKSKISDLDKMKIEEQKRAVRSGYDMDVLPSDLVTYGEEAKNLLEDLQSRNERMFLVTVLVMNTARKRQKLDNNIFQVQGIAQKYNCSLKQLDYQQEAALMSCIPLGVNRIEIQRGLTTSSTAIFVPFTTQELFQEGEALYYGLNALSNNMIMVDRKRLKNPNGLILGTPGSGKSFSAKREITNCFLITEDDIIICDPEAEYSALVQALHGQVVRVSPVSDQYINPMDLNLNYSEEDNPLSLKADFILSLCELIVGGKNGLEPVEKTIIDRCVRLVYQEYLADPVPEKMPILEDLYNLLRKQEEPEAQRLATSLEIYVTGSLNVFNHQTNVDINNRIVCFDIKELGKQLKKIGMLVIQDQVWNRVTMNRSAHKSTRYYVDEFHLLLKEEQTAAYSVEIWKRFRKWGGIPTGITQNIKDLLSSREIENIFENSDFIYMLNQASGDRQILAKQLNISPTQLSYVTNSNEGEGLLFYGNVIIPFVDRFPKNSLYKIMTTRLEETSEAGMAYVPVPKDLTKVKTKVALNLTKRQLIFFSLAAVVGIPFYLVMRKPIGSSIAAILMVTIMLPFFFMAMYEKDGLPFEKVVANIIRQKFICPAVRPYKTENFYQEISTLVKKEGVPDGKKDKAGGSAGASVPGGKKKPSGKKKQKKQKRKRTGKAADDVYACWKAGAAIAHLHMRDDNGNGTMDKNKFIETVNLIHERYPDCDIILNLTTSYYHLIMVVKYRRKVIDDPISERAKEIWERIAPDYGITLEEWNHDVDHVHVMFRAQPKSELSKFINAYKSASSRLLKKEYMETSESKFEIIHETINKANNTLSVKMLCEIAGVSRSGYYNWVHSADKRAEKEAQDRADFELVLAAYSFRGYDKGAQGIYMRLLHMNPPVVMNVKKIRRLMKKYGLMCNIRKANPYRRMAKAIKTNNVADNLVKREFEKYGPRRILLTDITYVPFDGRFCYLSAIIDAFTKQILSYVLSESLEVDFVLETVNLMIEKHGVSLTTKTILHSDQGCHYTSCSFIQLVKDKGLRQSMSRRGNCWDNAPQESFFGRMKDHIGDRLKECGTYSEVRAIIDDWMDYYNNDRYQWELAKLSPNEYYKYITTGIYPIKGKIPSTDMYDEEGNKTNMKEYTPKQIKELKANPYTLNVTKNKLYFTAKFKEDFWISYQAGNAPRKILLDFGYNLEYFGQKQIDDIVQRIKRQALSGNGFTEGENRQKRIPMKATNEEDLSSPQSIERMQNELLYLRQEVEFLKKIIIADNSRKRDMNIAYRFRIYPNREQEVLLAKTFGCCRFLYNQMLNDDNAKIDFSNVKVEPLFEEEVDFDTFSKSDFRAVKVKECVAVPKSKKLLQFTLDDGTGTHREIAEKYCLKSVTISMEPSGKYYASLLYEKSDCENQAEEFDYEDAKILGIDYAMHGMAVFSEDIQKENEGYFRKNEERLAREQRKLSHCVKGSNNYYRQKKRLFLEQGYKNTTVSQIVDEAGVARGSYLNLFPTKDRILLELTETMFGGQFGVARSIADSKLPPVYAYAVETAIQLTLTELNENLREIYIEAYSLPDTSEYIYLHTTAELKQIFGEMDRSGGYSEEENVQLKIYSDQDTHGMAAWVIIFALVFCGLMYYMAYVPVPKDLTKVKTKVALNLTKRQLIFFSLAAVVGIPFYLFMRKPIGSSIAAILMVTIMLPFFFMAMYEKDGLPFEKVVANIIRQKFICPSVRPYKTENFYQEISTLVKKEGVPDGKKDKAGGSAGASVPGGKKKPSGKKKQKKQKRKRTGKAMLQDGICQVTKNFFSKTIQFYDINYQLALNEDKTTIFENYCDFLNYFDSSISVQLSFINQQVDVAEFEKSIDIPDQNDDFNAIRDEYRTMLKNQLSKGNNGLVKTKYITFGIEAESLKVARPRLERIETDILNNFKVLGAQAHSLNGLERLEILYHVFNQDRIEPFKFQYKMLPETGLKTKDFIAPTSFNFSKNQTFMMGRTMGSVSYLQILAPELTDRMLADFLDVDDSINVNIHIQSIDQSSAIKMIKSKISDLDKMKIEEQKRAVRSGYDMDVLPSDLVTYGEEAKNLLEDLQSRNERMFLVTFLVMNTAKKRQKLDNNIFQVQGIAQKYNCSLKQLDYQQEAALMSCIPLGVNRIEIQRGLTTSSTAIFVPFTTQELFQEGEALYYGLNALSNNMIMVDRKRLKNPNGLILGTPGSGKSFSAKREITNCFLITEDDIIVCDPEAEYSALVQALHGQVVRVSPVSDQYINPMDLNLNYSEEDNPLSLKADFILSLCELIVGGKNGLEPVEKTIIDRCVRLVYQEYLADPVPEKMPILEDLYNLLRKQEEPEAQRLATSLEIYVTGSLNVFNHQTNVDINNRIVCFDIKELGKQLKKIGMLVIQDQVWNRVTMNRSAHKSTRYYVDEFHLLLKEEQTAAYSVEIWKRFRKWGGIPTGITQNIKDLLSSREIENIFENSDFIYMLNQASGDRQILAKQLNISPTQLSYVTNSNEGEGLLFYGNVIIPFVDRFPKNSLYKIMTTRLEETSEAGMLRAISYVLTFSGGAVFGIAFLCLLQAGKGYPKKEEMAEQRMKVRDKKVQKMTKDGLVEENLTDKSSVRVSNRVGDVQMGRKQGEKEENLVDKSPRQSERSGKNIRPSVQKSRDAPELIRTEKQSEDFGQSSKQQNRKRIRAEVGKESRLAEESEAGQSGRLKEKRADLSENRGDSRRNQTGGSKKPKQKQRLKFAYEETGASVKNDKDMEKLNQMDTDGVNFRHQKQKEKAKKFSYEEARKKKEAKQHSKKAQVYQANEGETPGKKKSRLKFGEGESVKIEKTSVVKKAGSATSVALHREISKNEDDNAAVEGAHKLEESGEGVYRLEQRSARRRKQWASRKRSRLERQEEKQAQAASHQEQKKLKKQIQKQQIKWDYAKAKRSEQTVGTATKGTIDYIKKIGGKVTNFFKENRKVYISVAVLIGLMFLIITNVTSCSAVFLQNVITYTGTSYLSSDQAIREAELYYTQLEANLQERINNMESEEPGHEEYRYNIGPIEHDPFILISYLSAKYEEFTFEQVKPELDALFALQYRLETEAVNETVTETATVRVGESLGQVVTSGYCNCPICCGIWSGGPTASGAYPTANHTLAVDASNPFVPMGTKVVMNGVEYTVEDTGAFARYGVQFDVYYDSHAAASAHGHQTWECYLADDNGSNEVEVTRTRDVDVLNVTLNSGNLMSICQDRLGFFQKELFSAYNDTKGNLQMFATPVDFNWYSSVTSYYGYRIHPISGANQLHNGMDIGAPEGTKVMAGLTGTVTTSAYNDSYGNYVVIKDSKGYELRYAHLSSRSVSAGASVTKGDEIGLVGNTGNSTGSHLHIELLKNGERLNPIFYLETGEGAGFGGNEYTSEAAQRLLNEAARYLGTPYVWGGYSPSGFDCSGFVSYCLTHSGVRNTGRLTAQGLYDICTPVSQSEAQPGDLIFFTGTYDAGVPVTHIGIYVGNGQMIHCGHPVQYTSINSPYWQSHFYGFGRWMDSDDGKEKGGVTAVRKGEAMKSLEKATADYEKAKEKMEASKARYEADLKRFKAAEIAKTEAENLEIVKIIRAMDMSIPELEAFKKRMKNELPGRVEIQKEETRSDDEFREDETEEIMMNLEKMKQKKSKNSVKKGLLAATTILCLTSPMLQTQSVLAAENTAPAITIEKPDGWRQGETAVAITVDASHMPEGFSITKIEAKAGKDGSWQDVTGNGSISITGNQTVYVRVTDGEGKVYEQNRSIKCYDTEKPTLSASLTDGVLTIQGNDTVSGITSVTVNGTTYTDLKDGMLRVQLTQKDFTTKQIEITVTDGAGNTSEKYVLQNPYYEWAKKQAEKQKTSGDSNGAMATTTSADATGTEKTTTSPLPQDAQASEPTDAKGTVDDRTVTGIEEQLNKEGETADSVTKTATEGTKEFYTISTKSGKIFYLIIDNSKSQDNVYFLTEVSEKDLMNFTLSDSVTLPEVDIVYAEPEKQAEEEKPETTETDEKDKVEDEIQMPEDKSLAGTYLLIGLVAVGAAAGGYYLKVYKPKHEYDDEDEMEEDENESEDSESEKREVDDADEQEEQENAGTEVLKDEDFNDEVLEDEEEEQEMKLVIAEKPSVAMALASVLGARTRKDGYVEGNGYIVSWCVGHLVGLCDASEYDEKYKKWRYDDLPIVPECWKHKVLEGTKKQFGILKKLMRDSKVDEVICATDAGREGELIFRLVYEQAGCKKPMKRLWISSMEEQAIKDGFASLKDGSCYDSLYQSALCRAKADWLVGINASRLFSVLYNQNLKVGRVQTPTLAMIVDRNQKXXXXEILYGSYQIMAHIKFDDMDAVTENFQKKEDADKVAAECQERMCEVEKDDVKEKTVRPPKLYDLTTLQREANRMFGYTAQQTLDAVQEMYEQKLVTYPRTDSQYLTDEMGESTETLIQMLFGKMPYAEGLEYQPDVSKVLNSKKVSDHHAIIPTMEVAKADIGELKERSRKILYLISARVLTATADPYIYESHKCQITCNYHTFYLNAKKTKQEGFKTIEKKLKQFFGIIAEKEEPELDIWAGKHYGPCDSFVSEHFTQPPKQYTEDTLLSAMERAGNEELTEDTEKKGLGTPATRAAIIEKLIQSGFVKREKKNLVPTDDGNVLITVLPDEIKSPKMTAEWEMALNHIAQNTETADEFLNGITELMQELVARYQGISEEKKNQFQGKAKGEVIGKCPRCGADVREGKVNFYCSDRKCAFTLWKNDKFLASQGKKMDKVAAKKFLSKGKIHYKDLVSRKTGRQYEATVEMVDPGEGNVQFNLIFPQRMKKKGNFRKVVSGLLAGMTMLSTVLSPMTAYAAEIQPEEKPPLYEEVKDLLDEDEVVTAKDYEIETGSVFDVKSDYTGLEIKDDNKVKVTFEEAKNDKDEDFTTDHADTYKAVYYVEPVNQEHPKYQISRKLIVREKATEAQTETAGSEAVTESETAGSEQQTEEAEDSEADSEINDIDADEFDDLVEQAQNQDTYDEESGLELHDVLEQAGDEGVDLDAMEEGEIATFEAVSAYSARSTQQVTIEKGPLYRYADYNLGTYLTEPYYISYGNVRAIAYCVQPAKPGPGSGNYTITKIGDNQALAKVCYYGTDAAGSESFFANKHTDFSEGKRFIIIHMAASYANGSSDAFYGTNATGEALAKELYNYCVNKPEIPDVAMSFSKPDVKAYVDRNVQRTENIKFNASSQQKITMDLPKGVKLHNVSTGTVSAAGASVTIGGGTTFYLSAPLTQTRDVSDTFSAKMKGSITKDYSAYKLTTNASVQDLAFVFGEGVADEKYVSLKVSWIEQATIEIVKKDDTANVNLAGAVFGVYSDEACTKLITQMPATDKNGKSSVTIIKTQDTVYLKEITAPQGYVVNATATNVKLVASKTSAVTVENKEQLAELTVYKEGQVLTGAEVSESGTVFHYENRRQKNAVYNVYAGADIVTAYGTKVYSKGDLVKENLTTGENGSVTLKNLHLGTYVVKEAKAPDNFYNGGEEKTVTLTYAGQNKEVVFADVTFNNERQKAEVTVVKQDKDTKKPLEGGIFALYAADDIKNADGVVVVKKGTLIEKATTGEDGKAKFTADLPINHSYSVKEDQAPEGYVRNTEDVYTFKFSYTNDKEATVSFAHTFSNDRVTAKINLFKVDKETGKAVPQGDATLKGAVYGLYAREDIVHPDGATGVIYKAGEQVASLTTDEKGQASVDGLYLGKYYVKEITPPTGYLADTEEHDLECSYEGDMTAEVKRECISSEQVIKQPFQIIKAANNGKTDADLLSGAGFTVYLKSSLTKKADGSYDFDSAKPVVSGENGATEIFTDEKGYACSIPLPFGSYIVRETTTPHNYKPVDDFEVNITENHPNEPQIWRVLLDKEFKAKLKIVKKDDETKKSVLIAGTEFKVYDLDNKKYVEQVTTYPVTTTHKSYFTDSQGYLIMPKNLKIGHYRIEEVNAPEGYTINKNYMEIAVDANTAYQMDSESGDAIITVDYENHPVKGKLTIYKKGEMLSGFKKDFVYEEKYLKGAEFNVYAAENIYTPDYQKDENGNRQLIYAKDALVTTVTTGEDGKAVADNLPLGSYYVVEKTAPEGFVLNHDRSDVAFVYADQDTPVIEQEVTVGDDRQKVAIQVEKQDAENGATVEGAVFGIYNKDDIKAEGKVIVNADTLLQEMTSDKDGIASCTLDLPLGQYYVKELKAPAGFVSSDEVLNLDASYQGQDVKTVKLKTVKKNQPTTVEITKSDVTTGVELDGAKLTVLDREGNVVDQWTSVKDQPHVIKRLTVGEEYTLREEIAPYGYLKATDVKFTLEDTAEIQKVEMKDEVPTGLLIINKNGEFLDKVTLLDNVKGTVEHLFEYVTGSLTDVTFDVFAAEDIKAADGVSKDYYKADEKVGTITTDSNGIAQMDNLPAGKYYVKEVKTAHGYVLDGEPRYVDLSYRDQDTPVITYDEKWQNTRQKVKVTVLKKEKDTDRVLAGGVFGLYTSEDIKNVNGDVLLEKDSLIEQKATDEKGQITFAADLPVDGKYYVKENSAPDGFVTTEEVQEFTFEYAGEDQAEVSYDFTFENQPTTVELTKTDLTTGKELPGAHLKVTDADGNVVDEWTSTEGSHVIKELVVGNEYTMTETKPADGYVTAESITFTVENTAEIQKHEMKDDVTKVQISKTDITGDTEIPGAKLTILDKDDQVVESWTSTEEAHYIEKLPIGRYTLREEQAPKGYLLTSDVTFEVKDTGEIQKVVMKDDTAKGKVILNKTDKSSGEPLKGVEFEFRDSKGKVLETLKTDAAGHAESKLYEIAAFKNGKYDTAIKYYLVETKTLDGYTLDQTKHEVTFAYADDSTPVVEVTFNLTNEKPEVPETPSTPDVPQSHEETKVSDAPKTGDNTNIWLPILLLLISTGGMAGLYISRKKIRKQMMKTMEKRQEARKNQERTLKRMMAYQKKAEQMVSRKRMNHHMIRKGMMNRKEFYEYVKDNVKDYLPDSYQNGEIRIEEVAKNNGLRLTGISIPQGDQRAVPMVYLDSLYMEYVNGKNLDSCVGDVADMRIEVQDKAAFINMGLPDILDYEKMKDKLQVRICDREWNEERLADKVVTEHGDFAAYYAVNVEENEGGIGSIPVTVNLMNEWGVTAEQIQADAVAADRNRGVVLMDMNEMIKSMIFGEEAENLLNEKLNVEAMENPMFCLSNAQKMNGASLLLQEDIRKQIGECLGSDYFVLPSSIHEVLILPDNGMFEVPELNAMVQEVNETQVERQEQLSDKVQFCDGKTAVMENAERREARLEKEKAAEKATGRTEAKGGIHGKLEKAKAEIKAKGTDTIPKNRAKDLASVLMDWCLYGDDKRKEMDRDLKPEYLLDDLRRYQDVFGEEFGVKELLMLEDIRVKAMIAGALADMPEFLIDQIGKASNSSNFPSMTRAMERIADVVEEKWEEEREMANKLYAMELLTEEVAKDVAANPQEWMRFLNTASRLYRYTFPEQLLIYAQRPGATAVASMEIWNQKMYRWIKKGSKGIALIDNTSGPKTKLRYVFDVQDTYKVKNLGRDPQLWNLNPEGEQLVADYLQERLALEATEGGLAEVLHQAAEESVQAWLPDAFDELQMDVAGTFLEDLDEQNQKVEFRELMTNSVWYVLLNRCGLDVQEYLDAEDFRHITDFNQLKVIGHLGSSVNEISRPVLMQIGRYVLNDLEKDLKTVAKEKEVAYNEFNTLIRESKTRNTEDRGENKEETEHERDHLQPEWRVPDSGYQSGGDERNDREVRIDEERVSEKPQSSQIQHSDLTEPSGQSSDGNRQPGKAESRQPDVRTSGEKPGTGQNGRRDGMDQTHEPDQSTGRGTGNSGDYLQLSLFPTEEEQLGEIRKAVAALEQPAAFLISDEVVDDILRTGSGQKNTLFHITARLIEGLDNEEMQNFLKEEYETGGKGFTIDGQKISIWYDNDGIRIRRGDSARRNFDRMVTWEEAADRIRDMYEDRSYVDNLISNNAIEQEQEEMTNLLALHFRDTSRNREEQQSYSDWQDVVREAWTDSAEADAIAHRFEWLQKDMDENPEDYRRWEIQHNPEYFQRFQDLQRERSWVDQKFTVERPALSFITQDEIDAVLRRGGITAGGRNRIYEYFMEHHDIKDAAEFLKNEYGTGGAAPGIPGAYESDASHDAKGLKLAKGKIGSPDVEVLLKWNKVAERVRQLIRTDDFLSPEELEKYEERQEAQRQADLEGAQQALEVEQEGSDQQEIREENQEPSEVETQPEAVEDAEKKEDITPEQSDIPATNFHITDDELGQGTPKEKFRANIMAIQLLKKCEEENRNATPDEQEILSRYVGWGGLADAFDETKSAWETEYLELKTVLTPEEYAAARASTLNAHYTQPIVIESMYQALENLGFTKGNILEPSMGVGNFFGMLPEKLNQSKLYGVELDSISGRIAKLLYPDANIQIKGFEKTDYPNDFFDVAIGNVPFGAYKVNDRQYDRYNFMIHDYFLAKTIDQLRPGGVAALITTKGTMDKASPEVRKYLAERADLLGAIRLPNTAFKANAGTEVSADILFFQKRDSMTKEMPEWVNLGSDANGITVNQYFADHPEMILGEMKEVSGPYGMETTCMPIEGADLEVQLAEAVRNIHGNMAPAVDVDAELDDVPESIPADPNVRNYSYAVVDDQVYYRVNSLMNQVKMPAATAERVKGMVEIRDTVRELIAMQMEESVTDEEIHKQQEKLNQVYDAYTAKYGVIGSNANKRAFSDDASYCLLCSLEDLNEDGTLKRKADMFTKRTIKKAVAVTSVETATEALALSLNERAKVDLSYMAQLTGKTEEKITEELVGVIFKNPLTDQWESGDEYLSGNVREKLNTARTFAENHPEFTPNVRALEAVQPRELEASEIEVRIGATWIEPSDYQDFMRELLHTPWYLAQKEIQVKYSEVNGEWRITGKNADSPRNAFAYATYGTERANAYRILEDTLNLKDVRIYDKSVNENGDEIRVLNKKETMLASQKQDAMKAAFKDWIFKDQQRRERLVRVYNERFNSIRPREYDGSHLTFPGMNPEIELRPHQKNAVAHQLYGDNVLLAHVVGAGKTYEMVAAAMESKRLGLSQKNLFVVPNHLTEQWGAEFLQLYPGANILVATKKDFEPANRKKFCARIAMGNYDAIIIGHSQFERIPISDERQEAMLRKQIDDLEIAIQSARYEQDGGRYTVKQIEKTRKTLMTRLEKLNQKEKKDNVVTFEELGVDHLYVDEAHSYKNAFLYTKMRNVAGIAQNEAQKSADMFNKCQYLDEITGGKGITFATGTPISNSMTELYVMQRYLQNSKLQNMGLGLFDSWASTFGEVVTSIELAPEGTGYRAKSRFARFYNIPELMNMFKEIADIKTSDQLNLPVPEAEYETVVLKPTEQQKEIVASLGERAEVVRNGGVDASVDNMLKITNDGRKLALDQRLVNELLPDDPGSKVSVCAEKSYEIWKDTVVQKSAQIIFCDLSTPKGDGSFNVYDDLKQKLMAKGVPEKEIAFIHDANTEAKKTELFGKVKSGQVRFLIGSTAKMGAGTNVQDRLIALHHLDIGWKPSDLEQREGRIIRQGNHNKKVHIFRYVTESTFDSYMWQLIENKQKFISQIMTSKAPVRSCEDVDEAALSYAEVKALATGNPAVKEKMALDVDVAKLKLLKANHMNNQYRLEDDIARNFPQQIAKLTETIDSYKADIAHYQEHKITDPEQFSMEISGKVFTEKKEAGAALLAVCKDMKAVDAAMDIGNYQGFNMRIQFDSWSKEFILSVKHESVSKVHLGADALGNITRINNLLESYPEKLAEAEQRLETVQEQLTNAKEEVGKPFTKEEELNQKLERLSELNALLNMDEREDTEAEQSESKEKEERPARGSIHEKLQIYKEKSQRESENGREDRKRDFGLEMARNMITGIETQKMQEYTQEQIDRAEHMGIAIPADVKEQIFEYANLVGEEEKVRTLVRNLADAVNRSDEDRVEELLDDAQMDIQDLPDPTIGKLELRDYGYTAEDMVPLRKAAALDYHRMGSKIYCLGSDGSKGEYASKEMIQAHEGLFGMESQMWERIRDQDLDYADEDFGAFQEPMNVIGQEEALKLYDAGADIYLITNFSSPIYVTERMEIERGPEHYQMSTEELERFRNLEWEMQKYPQIQSLKEANLLLGTRRTFGIYQIRDGLPGENYAFMNMSFIESHGMQIKKEDYELVYVGELFGNMSLDDIFERFNIDRPEDFRGHSLSVSDIVVLNEGGKVTAHFVDSISFEQLDSFLNLEEQVLSELAYEVGERYFAIQRTEGGYDYSFYDEDFRLMDGGVYENGEISIEEAAEELLEDEGWTGERIRGDYDQLMEKVEEMDEVVMAEIQKSQGEYKPLAKVEELEEANYNMIDNVLNNMPPKKEPYLEYFAAECDEFHDMGAYEKSTDVNQIAAVYEKYRENPENAYRVCSMGIIYRDPEDSYYDDAEFAIVKGNTVLGNLMDDVRFYGELALIREGIEKIHDALPDYKYVPMRDVREAMYPEKMTTEQLAEALDEIAEAFDPYEYRDNVETGENTVQEVMLDLQSGNTHSYISYLKDIVDEECDQSVRAGVLIERLKVYEPEFPKNLEPMVYVNYCEESALMNPRCQKLSELDAKTAEMDKEWYAKRDSKTEEPTKITKIYVTVYYAEKGEQMLHHFKKSIDIGNGHGGIVSQLKYDNEMKLTDEYWINYQKGKGSEEFQKYMEDLTDMQNHVLPYLQSFCNLEEKGVKERREQQITERNEGRADERGTSTEANAVVKDAGKADRKQVQQKQAVVGKDKKLSIHERLEINKRIIQEKQGKDKPERGADRGVRMAISYNGLWKQLIDHGMKKGDLCAKTGLSSSTIAKMTNCESVKLSVLEKICKELDCNFGDLIDYVPDNKEKMATRSAKIDQKADLIWAIADKLTGVYKPHEYGDVILPLTVIRRFDCILSDTKDAVLQKYDEVKNLPMKDILLRKASKKDFYNTSKYTFERLMDDPDHIEENFREYLNKFSANVRDILEKFKFDGHITTMANKGILYIVLKEYTTDRGNLHPNEISNLEMGYIFEEIIRRFSESHNEDAGQHYTPREVIQLMVNILFYDDNDILSGNNVAKTIYDPACGTGGMLSVAEEYLHSLNASTELVSFGQEINDQTFAICKADMLIKGNNADYIKDGNTLSDDQFAGSTFDYILSNPPFGREWKNEKAKVEEEAKLGFGGRFGAGLPATSDGQMLFLMTAISKMKDIDKGGSRIAIIHNGSPLFTGDAGSGPSEIRRYILENDLLEAIIALPNDIFYNTGIATYIWVLSNKKAGTVREGKVQLINANEMFVKRRKALGNKRNDISKEDIAEITKIYGDFKESEISQIYDDEDFGYTKITVERPLRDEEGNLVLKKGKKQPDTSLRDTENVPLKEDIKEYFEREVLPFAPDAWVDEKKSKVGYEIPFTRYFYKYEAPRPSAEIMAEIMDLETELSGSLEEVFDLMREMKDSGVEWIGKIPKDWEIVPLTKQLDSIVDYRGKTPEKTEEGTFLVTAKNIKDGKICYELSKEYVREADYEEIMHRGIPQIGDILFTTEAPLGQVANVDRTDIALAQRIIKFRALSTVNNYYLKYWMLNEGFQQFLHSLSTGSTATGIKSSKLFLLPLVRPNIEQQNKIVEYLDAKCSKIDEIVEKQKVIIEKLEEYKLSIITEAVTSGINPDVEMKDSGSVWFGNIPINWEMKRLKYVFHIQKDIAGEEGHTVLSITQRGIIPKDFSNNEGQFANSYANYQLVHKGDFAMNHMDLLTGWVDISKYEGVTSPDYRVFVLNDKNGMCPKYYLYMMQMCYSARIFYGLGQGVSGMGRWRLQADKFLNFYIPIPPYDEQKKIADYITDKVNHIEVEIDKRNKLIKKYQEYKKSLIYEVVTGKKEVMSDFDVKEKRFEEDIEDYLTHHGGYTKGDPKKFNRESGLEEDTFVEFIKTSQPKKWERYVKIYAENSEKQIIERFKREVKTTNLLNVMRHGFMDRGIKFYPIFWKPETSLNETTQMQYDANILHCTRQLHYSVKEKGLNDLEVLVAFSGEVKDNDDVFTEEGMNKDKEGKTIKEKALPETFHADDYGILVVAEKYQTGFDEPLLHTMFVDKKLSGVKAVQTLSRLNRTTRGKVDTFVLDFVNSAEDIKASFEPFYEETVLLEETDPNVVYDMKNTLDDFRVYQKSEVDKFADIFYQNENQSAGDLGKLQGQLRPAIDRYEVLEVEKQDIFKSTLASFNRVYAYITQVCRLFDKDIHRFSIYSKFLYTMLPKGHGGEKINIDDKVLLEYYKLEKDFEGPIELESTEGGYTPISGDSGHREPKKDPLTVIIDKINEKYGTHFTEMDKVLVQMENDYANQEKWQSYAKNNDRATFMLLFEKDFPNMAADRYEQNDQFFRKLFDDPDMMRQVMETVGSVLYERLKKKYIFDPKSGVIEEATPETYVEDTYLTKKMQLGWIDFSKEDRQKAFDVINLLSEQGAVDELGIGVIRDAFANYFFPGTSTIQTRAKYFLIVPYMLREAVDGRYGKDANRVLRAIDSAEKDCGIRLLEADPKAEGVIGSRVLPKGWVARKPSDIYWNGIRTFGIFCDYGLSIPEYVSLAVKLKEQKSVSRLGNRNDDAEENDKDDSDAGDIGNIRFWNLPIYHDDWRDNLTIELTQEEAFYLDKQIQKSTKGSLLEYVLKNRIDLNEYDDFASLTAELSEKVGEKLAYMMKLACDFNNLVYMARVRYNVMLSEDENTYANDEWSRLLPDIRHNATVDLDAVFGEFQLINPRAKSFLCGIQAAFITLDIDMADELIRKRERSLKGAARAKLSRTKEFDHSKWVGGGMLDYRFSNARRIVNDIYAGEVSADVMFRPDSNRDRTDYSGILMPPDGYRLDRAVGTTYSLDLEALTAVAICLGLSEETDSKLMQNPIGMLNALQKVSDKIVLFCEAGQIKVPTKPTALSILLEKMVVEVALPKDRQLGRYPSFHPKTWVLAYVNADGDKKYRFVVMSRNLTFDRSWDISFAMDSSKNVRQKKKTQPICDFLDYLVMNVHNTSNNAGKKRNLIRGLCADIKDVSFSLDSKIFGEDFEVLPLGIGKNAYRMQEDILFCKERGNANSTFNELVVMSPFLSESVIADFNLTDRALSDCKRTLVTRRSELGKLKASDVDNFTIYALKDEIIDGEEEISDELADKKKQDIHAKIYLRRKYSDVDLYLGSMNASYSAINKNVEMMLWLGTKNMYLNGDKFLEDIFCGPVGDAKNPFEQVTVADAVLETESDNRNLLEQKIKDLCRVKRQAVISEDNENAGKYKIEVEFSGIESDSEVTVSPFNSKQEQTLSEHIEFSELEILQLSEFYEITARSGDDTIRRIIMIPTSGFPDDRESAAVNSVVKDRASFVEYIAFVLGDDYVASMLEGKQMGESGFFANSSDAMPALYEKMLKTSVEGPERIKDIGYVLKMVTDKDIIPDEFRELYETFCNTLKIRRMLQFNIDEIEKRTLSGLKDFQRATVERVDYLFRHNQNRVLVADEVGMGKTLIARGAIVKTARLRIEEKDDLFKVIYICSNQNIANQNIRKLDVTGKNAIGSVSDTRLSMQHLKITEQENDPQIKEGFIQLIPLTPETSFRMTTGGGSVQERALMYAILRRMPDFKGHVTSLGKFMIMDAVKAWDGWAKWNFENRVAECEKMTKGVYPQNVIEKILNYQEYESIRDMLLNHLHERRYNKQLTYSNYYVMNKLRVMFARISVSMLEPDLVIMDEFQRFKFLLSSDDSELGILAHSFLSGHDTRVLLLSATPYKLYSTLEEIDENQLDEHYAEFFQVMNFLFDDEVKDIKFKEVWKNYSHALSELKAGDSAIIRMKELAENAMYQGVSRTERISVMDSGDYTDDSSVKHHLQIDENDINSYIQMSRLLSKTDSNHSLPVDYAKSCPYLMSFMKKYKIKEQIEKYYIKHPDEFGSEREQCLLWLNRNKINKYDELPKTNARLEALKEKAFTGGAEKYLWIPPSLPYYEMQGAYKNSKGFSKILVFSAWEMVPRMIGALVSYEAERLTVGKLVHQIKNQDKKNTGYFADGSRRYPVARLRFNVSNGEVRGMSLFALLYPSKTLSDMYLPIESLNNHESLEVIEKSVRLKLKEKLAIIEEKYGDSGNNKEDARWYYLAPMLMDGVIYAKHWIEDIVWEMNTDEEDTTSEVRSSSKDKRNKGFIAHIDKLRSYLDAPEEIHLGRKPEDLLETLVNMVLGSPAICIYRSNGRSTARATSLAKVFVNNFNLPESTAIIDLAYGRCRDDNSHWQNVLKYCKDGCFQAMIDEYIHMLKETAGFQSDGNQYQIVHDMMMDSLKIHTATYIADTYPDFKKRINGADRKSDGCRIRSSYAVGFTKDAGDNSKVVMRKENIRNAFNSPMRPFVLATTSIGQEGLDFHNYCRVIMHWNLPSNPIDVGRILRTFKIKKNVEVTDNGKIIIMAKSLFEELGGKYERQGDYLIPCLTVPAEEEQAIGIWGQRHLDYLKQYRKVTYTNLLTSGRLNAYLADINRQAQERFERLIEGMKQAQGITEQLKAENALEWTGCLNNIRACAREIVEKEIIFAKAGSSFSIRGTVTSDLPLTEVTVGVYDTAGSMKTGKTVRPNTTSYDLRNVDTSIKFGSIKDLAVCSDAVKYKNINKSQKVKKLEKQKRRLQRSISRSYEKNKKGESYCKTNNVIKKEKLLLKRNHRLTNIRKNYLNQTISEIVNRKPRFICIEDLNVSGMMKNRHLSKAVQEQGFFGFRKQLEYKCNDKGIQLIVADRFYPSSKLCSCCGNIKEDLKLSDRVYRCECGNMIDRDFQASINLKAYGERFASGFFQKELFSAYNDTKGNLQMFATPVDFNWYSSVTSYYGYRIHPISGANQLHNGMDIGAPPNREQEVLLAKTFGCCRFLYNQMLNDKIREYEATKKMLRNTPAMYKKAYPFLKEVDSLALANVQMHLEKA

SEQ ID NO: 2 - protein, 866859 aa, Eubacterium rectale (residues 1-288,953 of 866,859)
  misc_feature (181184)..(181234): Xaa can be any naturally occurring amino acid
  misc_feature (740872)..(740875): Xaa can be any naturally occurring amino acid
  misc_feature (741890)..(741893): Xaa can be any naturally occurring amino acid
  misc_feature (759161)..(759164): Xaa can be any naturally occurring amino acid
  misc_feature (805597)..(805616): Xaa can be any naturally occurring amino acid
MGSNMDSKEFDLYKDIRCRTNGEIYIGVVGPVRTGKSTFIKHFMELCVIPKMDNEYAKKRAVDELPQSGKGKTIMTTEPKFIPQDAVTISLDDGSAVKVRLVDCVGFTVGDAVGYLEEDGERMVKTPWFDEDIPFEEAAVVGTKKVIEEHSTVAVLVTTDGSIGDIKRQSYEAAERETVMQLEASGKPFVIVVNTTKPFAAETRLLCESLSREYKAAAIPIDCEKLCMGQITDIMEKLLYEFAVTRVDYDIPKWVQLLPYDNHVKQAVITYAKTFLARASKLKDVAQMSIDMPESDGDILKAVSLAGMGLSDGVVKVKIEIAEKYYYENISALCGVTISGEKELISLILSLTEEKNEYEKIKDAFSSVQQKGYGVVMPQLSDIRMEEPVLIAHGNKFGVKMKAISPSIHMIRANIETEIAPIVGSREQAEDLIDYIKNGENSDSGVWKTNIFGKSVGELMEDGIRSKIMQMDDECQIKLQETMQKIVNDSNGGMICIIIMRTSGVLMPISSLPSQYGIGTMGKEARRFVDFLEKGGQTYWQILPICPTSYGDSPYQSFSSFAGNPYFIDLELLCKDKLLTKKECESYKWGKKPQYVDYGIMYVNRYALLRKAYERFSKKTPADYEAFCSKEAEWLDEYTLFMALKDANGGVAWSEWDDALKFRKPEAMEEAKEKYADDIAFYKMLQYLFFKQWTALKAYANEKGIRIIGDVPIYVAMDSADVWANPTQFYLDKDLNPIEVAGCPPDAFSADGQLWGNPLFRWDVMKKDSYSWWTKRISAMAKLYDIVRIDHFRGFDSFYAIPAKDDTAKNGVWKDGPGMDLFNVLEKKLGKLPIIVEDLGFLTPSVKKLLKDSGFPGMKVIQFAFDSREDSDYLPHNYPQHCVVYTGTHDNDTVMGWMKTAPKDCVRFAKDYLNLTKEEGYNWGMMRAAWSSVADMAIVPMQDLLGLDSKARINIPSTTGGNWQWRATPEQIDNKLAKKLHKCMQMYARLREEPEEASDKSDAKETADTSTSKTAGCEKKAAKMLFFLPFVVYALFGCVILYFKIIYNIHMKSYDIFALFSYYNIIKCNLMNETTRQLIVHKVKHNTKRLITSIKWVIFSIVVGIVAGSCGTAFYFALSVVTDFRMKYPWLIYFLPIGGLAIVGLYHLCKDDNDTGTNLVISAIHSGDKVPFKMAPLIFVSTLITHLFGGSAGREGAALQMGGSIGSSIGRVFRFDEKDKHVMIMCGMSAAFSALFGTPMAAAIFSMEMISVGVMYYIALVPCVISSLIAHGIASYFNVTNEFFAIENIPDFTILNSVKISALAILCALVSILFCVVLHSGEALYKKYLPNKYTRVFIGGCFVIIATMLVGNQTYNGTGMSVIQSSIDGSVRPEAFLLKIIFTALTLGAGFKGGEIVPSFFIGATFGCLFGNLTGFEPSLCAAVGMISLFCGVTNCPITSLLISFELFGYDGMPYFLLAIPFSYMLSGYFGLYRSQKIVYSKYKTSYINKSTHMKLGAIYSKEKTTFTLFSPVADSVFVIFYDKGNDSAETGRLEMVRGEGELRSIFSATAEGNLDGVYYTYEVHTSDGTFSSHDPYARACGVNGHRSMVIDLSKTDPDGFADEDRPKLADPMSMVITEVSIVDVSAGASAHSMYPGKFKAFTEDKTLSYFKDMGVTHLQLMPSYDFASIDESDSLKEQYNWGYDPYNYNVPEGSYSTDPFNGAVRVREYKEMVHSIHEAGLGVIMDVVYNHTFNVHDSCFYKTAGNYFYRMLDAAKYSDASACGNEIASEKPMVRKYIIDSLCYWASEYHIDGFRFDLMGVLDIETLNEARKALLKINPDIIMYGEGWTGGESTLPESERGMKINAPRTPGIGMFSDDIRDAVKGHVFYMDELGFVNGAADRGEELKQAVTCAKWAKSPMQSINYLSCHDNYTLWDRFIISNSHESEEMRIRMNKLAAAILFTAQGIPFFLHGEEFARTKISEADGAPVENSYCSPLSVNAIDYDRAEQFSDLKAYYKGLIALRRAHKSFYLDTVDEIKKSVHFMDDMPDGVVAYTIDNDTEKVFVAYNAGKNKITIKLADALWEVLADEASAGDKALYTIKDQAIIPGVSCLVAVCKCMYAVITGASSGIGEQFAKRLAKEGYDLILVARRRERLTALSDKLKATHKELKCDIFTADLMQLDECQRLSDYLEEKDIEIFINNAGYGDCGLFEETDIAKEMGMIDVNVRAVHFLTKKLLKQMRVKDRGFILNVASSAGLIPAGPYMAAYYASKAYVASLSRAVACELRQSHSHVYVGCLCPGPVDTEFNDVANVRFALKGISAEYCANYAIDRMMKHKTVIVPTLRMKLATTCGRFLPQSLYIKIVSHQQKKKWHIDMVKKVIRFIVLIIGLSLVAYSGYHLFKIYSDYNTSDKTYEKLQDEYAVDDSKKNDDSTKGSEAQSPWYDDIDIDFAGLRSENPDVVGWIYFENEDISYPVMYSGDNSYYLRKTFKREHATAGSIFLEGSNKTDFSDCHTIIYGHNMKNLSMFGKLKYYNRDENYYDSHQYFQILVDGKKYRYQIFSYETVSDDSDEYTVGFEPDETFGKFVQRMAASSMKDTGIVPTKDDKVVTLSTCSTSGETYRFVVHGVRVDEHMFMINLRNGEIYVIKLKTFGSFTVGNDLTSVQEGAWRSKKLEKLFVYLAINRNRGVCIEDISKAIWQVEEETDNPVGALKNLAYRLRKALRDASFDEECIVSVRGGLYKWNDDVEVSIDVEEFDRYINEAEFAFSRSKETAIESYEKAIALYNGDFLSRLTDTHWFMTLNAFYHSRYVNTVKALAELYIDTGCYEKLEQLCTKAVVYERSDEQIYSYLILARMRTKKVQMAFDTYETAKAIMDNDLGVRKTVMLNKVYEELLSVTKGVSSYNIDEVKDDISEESMNGVFMCGYPVFKEIYHLEVRKSARSTVPESLVLVTVVPMYSSQPDKNHSHMKDSMLILERALRKCLRVGDVAAKYSDSQYIVLLSKCSCDTASDVMKRIIDRFNHTCDTNSNMTIQFDIEPVSCYSSFVTDKKMEKIYGMHDELTANDIKKMEDEIEYRKLVVRKKALDDVKVARAQGDLSENFEYKAAKQFKNQNESRIRYLEKMIKTAVVISDESKDDEVGMFNTVDVYFEDDDETETYKIVTTVRGNSLKNLISKESPLGAAIFGHKVGDRCEVKVNDDYSYFVKIMKIENTVDDGSDDLRKFMEIFDIIKSVIFGIVEGITEWLPISSTGHMILLNEILPLRIGKNPEDFYSMFEVVIQLGAILAVVVLFWSQIWPFGRKNNKAPLAKTGIGAWVKTDIFVLWFHILVSTIPAAIIGVLFDDVFERLFYNFQTVAIMLILFGIAFIVIETRHNGKSAKIDSLVDISYTTALMIGFFQLIAAVFPGTSRSGATIVGALLIGVSRTVAAEYTFFLAIPVMFGASLLKLVKFGFHFTGEEAAILIIGMIVAFVVSLIVIKFLMGYIKKHNFIVFGWYRIVLGAIVLLCGIAGLLMKKKISIMLCIVLFALTGCTTSGSTIRFGAADIGGMYYSFANTFTELANEQGYDFTCKVRTTAGSNANIRLLSDGYIEIGLAQADLIADAYKTNGDLRAIAGLYTETCQLVVRADSNIQTLDDLSGHTVSIGAEESGTERNATQILEFAGMPSSLVATKNLDYIEATKELKAGDIDAFFCTAGLTTTVIDELSKECDIRLIPLTDTVISKMLESSLAYTSEVIPAGTYTGQTTDISTIGVKSVLITKADVSDDTIEQLTSLLFEKENEISYSNSLKLELTYDFATDDIPIPFHDGAKRYYKACGYSTNMKIQLDMYQTLAVAVLVLLLGNYLKKKIYFLQKFCIPAPVIGGLIFAIMTCICYVTGIAEFSFNDTLREVCMVFFFTSVGFQANLKVLKSGGKSLIVFLGLVIVLIILQNLTAVGLAKLLNLNPLIGMCTGSIPMVGGHGTAGAFGPVLEDLNIKGATTICTAAATFGLIFGSLIGGPLGKRLIEKHSLINTAANEDDSLLVEDEKKHERHTNMYADAVFQLILAIGVGTIFTMLLTKTGLTFPIYIGAMLAAALMRNICEYTGIATIHMGEINDLGGISLSLFLGMAMITLRLWELASLALPLVILLAAQVLLIIIFTYVIEFNIMGRDYDAAILVSGTCGFGTGATPNAMANMQAVCDQYVPSIKAYLLIPLVGSLFADFLNSLVITFFINLLMFEKLKKIFKNREEKEKHNYDLTFDNVAIPEVHVKSTKSHEDADKENAPISYDNVAIPEVHIRNRKNKMKKKLITIVIGAMLCAGLFAGCGQSDTKQDKAAGTESAKQADTKDEGEKGSQEENELTGTIDDIKDFMFVVTDDKDTPYSFTFDEKPDGLEGVASGDKVNVKYTGTISEVDPFEGKIISVEKAEMNILLINGSPKGKRSNSLRLANSFIEGFKEGYKSKNEAISIDEMHVASMNVGACKGCFACWQKTPGVCCINDDMQTVIGKMLEADIVVWSFPLYYFSVPGILKNVIDRQLPMSLPFMSTKDDGYGSGSHDCRYDMEGKRHVLISTCGFYSAEENYDSVLRMFDHFLGKGHYTTIFCGQGELFRVKELSKRTDEYLATVKSAGAEYAITGKISEKTEAALHTLLYPREVFENMADASWGISRTTGQKEADDLVFTRQMAALYNKDTYDGKERVLEICYTDLKHTYQIKLDDKGSEVLTDQSLAATTRIDTPFTVWSAISRGEIGGAEALGKQMYTVTGDFSLMVNWDKFFGSTSAVKETEKTSQGVEVQKNPSMMTMLIPWITFWIAVSVNTEKGSVIALLVASAIPFIMRKHKFVIWDQLSIVAVATLSAIASLTGAGDISTDIGYLVFGLFWLVSCLTKEPLCATYVKYNYGGEAAHKNPLFMKTNYILAAAWGVLYVLTAVWTFLLKKAGVGATLIVVNNLMPVLMGIFTGWFEKWYPARLARGSKKQMANKWVYTFKEGNMTMRNLLGGKGANLAEMTEIGLPVPQGFTITTEACTQYYEDGRKINDEIMAQTMEGVKWMEEVNGKKFGDLKNPLLVSVRSGARASMPGMMDTILNLGLNDDVVAAMIAGNPDPAFERFVYDSYRRFIQMFSDVVMEVGKKYFEQLIDKMKEDRGVKFDVDLTAADLKELAEQFKAEYKNQLGTDFPSDPVEQLKLAIEAVFRSWDNPRANVYRRDNDIPYSWGTAVNVMPMVFGNLNNESGTGVAFTRDPATGENKLMGEFLINAQGEDVVAGVRTPMPIAQMEQEFPEAYADFLNVCETLENHYHDMQDMEFTVENKKLYMLQCRNGKRTAPAALKIACDLVDEGHKTPAEAVAMIDPRNLDTLLHPQFDAAALKAATPLGKGLGASPGAACGKVVFTADDAEAWAERGEKVVLVRLETSPEDITGMKAAQGILTVRGGMTSHAAVVARGMGTCCVSGCGDINMDEENKKFTLAGQTFTEGSEISIDGTTGNIYAGIIPTVDASIAGEFGRVMAWADEFRRLKVRTNADTPADAKKARELGAEGIGLCRTEHMFFDPERIAAFREMICSDTVEERETALNKILPYQQGDFEKLYEALEGCPVTIRFLDPPLHEFVPTEEADIEKLAKAKNKSVEEIKAICESLHEFNPMMGHRGCRLAVTYPEIAKMQTKAVIRAAINVKKAHPDWDIEPEIMIPLVCEIKELKFVKKIVVETADAEIAAANADIKYHVGTMIEIPRAALTADEIATEADFFCFGTNDLTQMTFGFSRDDAGKFLNAYYDNKIFENDPFAKLDQTGVGKLMETAIKLGKPVNPNLHVGICGEHGGDPSSVEFCHKIGLDYVSCSPFRVPIARLAAAQAAIAEQAKMEKTMDKIVQVAKARGFVYPGSEIYGGLANTWDYGNLGVELKNNVKRAWWKKFIQENPYNVGVDCAILMNPQTWVASGHLGGFSDPLMDCKECHERFRADKIIEDFAQDNGIELETSVDGWTNEQMVDFIKEHNVPCPSCGKHNFTDIRQFNLMFKTFQGVTEDAKNTVYLRPETAQGIFVNFKNVQRTSRKKIPFGIGQVGKSFRNEITPGNFTFRTREFEQMELEFFCEPGTDLEWFKYWRGFCRDWLISLGIKEDEMRLRDHDPAELAFYSKGTTDIEFLFPFGWGELWGIADRTDYDLGRHQEVSGQDLTYFDDQKNEKYLPYVIEPSLGADRVVLAFLCAAYDEEDIGTPEKPDVRTVFHFHPALAPVKIGVLPLSKKLNESAEKVFAQLSKTYNCEYDDRGTIGKRYRRQDEIGTPFCVTYDFDSEEDHCVTVRDRDTMEQERIAIDELDAYFAKKFEFMNKKLSMLLPVIATCGLLAGCGTDYYTKDSTVFVAKNGSVVSTDVEDFDTAAYKQDDLQSYVDKSIDDYNKKNDGSIKLKKLTVEKKKASLTMSYASTDEYTDFNGTKLFSGTIAEALAAGYDFKTDFAAIDDGKAKKCESSEFLDETGYKVVVYEGSSNLHVKGKILYASVDKVKLVDDKTVAIGDKYSLLASQTTGTESATESTEAVKADATEGTENGADGSVSDDDILNSVKQDNEVTFDFDSEEDNSAPVSYITYVIYKMSQSVVLTGMVLSAMPVGDFDKRITILTKERGKITAFARGARRPNSQLMAGSNPFSFGEFELFEGKSAYSLSKVTISNYFRELTQDLEAVYTGFYFLEFCGYFCQENNDEKDMLKLLYQSLRALESPAYKNELVRAVFELKAITINGEGPSLFSCIHCHSKEGLNVFSARRGGVFCDNCGTQVQGRHILSDTLYTMQYIVSADITKLYTFAVSDDVLEELRSIMKEYLSIYVHHDFKSAAFLMIQNFKSGFVTIIGRPNVGKSTLMNRLIGQKIAITSNKPQTTRNRIQTVYTDMEKGQIVFLDTPGIHKAKNKLGEYMVNVAEKTLNEVDVVLWLVEPTNFIGAGEQHIIEQLKKVNTPVILIINKVDTVEKEKVLEYIDTYRKVYDFAEIIPTSALRGQNTDDVINSIFKYLPYGPQFYDEDTITDQPERAICAEIIREKALHALNDEVPHGIAVGIDRMKTRKTKSGSIIDMDATIVCERDSHKGIIIGKQGSMLKKIGTNARYEMERLLDCKVNLKLWVKVKKDWRDSDFLIKNFGYKEEEMTIHDLAEYEILDEHRVEDVQSDGFILRHKKSGARIAILSNNDDNKVFYIGFRTPPEDETGVPHIIEHTTLCGSKKFPVKDPFIELAKGSLNTFLNAMTYPDKTVYPVASCNDQDFKNLMDVYLDAVFNPNITKYEEIFKQEGWHYELTGKDDELKINGVVYNEMKGAYSSPDEVLSSQIYRSLFPDNTYSKDSGGNPEYIPKLTYEAYLDFYHKYYHPSNSYIYLYGDMDVVERLEWLDKEYLSLYDYKKVNSEINKQPAFDEIKNVEAQYSITMDDSQENKTYLSYNRVVGDSLDEMLYQAFDVLDYALVSSPGAPVKQALIDAGIGDDVYGSYDAGILQPVFSFVAKNANASQADEFESIIESTLKEVVKTGINKEALLAGINSSEFKFREADFGQFPKGLLFGLNCLDSWLFDDMKPFIHLECLGTFAKLRKAVDTDYFEKLIQEYLLDNTHGSSVTVKPKRGLGNEREEALAKELSDYKASLSDEEIKKLIEDTEHLKKYQEEPSSDEDLRKLPMLTRADMKKNAMPFSNIEDELLDVKVVRHDIESNGIDYISFLFDAGDFAQSELGYLGFFTNALGLVSTEKYSYTDLANATNIYTGGISTGTASHPDIKDRNNFVFKFEVKLKVLEKNLDKALELMEQMLLTSDFTDTKRLGELVAQIKARLQANLSSSGHLVAAMRSMSSFSRYALYQDELKGVAFYRSICRIEKELSESPKSVSDKLAAIAKKLFARNRMLISFTGNNEAYGNAKPSLEKVIAGFNKMSAVGNQAEVHFNTAKEAFIDASQIQYVAKTGDFICEGYEYTGALRLLRIILSYDYLWINVRVKGGAYGCMNTFLRSGESYFVSYRDPNLSDTLDVYDRIPEYIKRFSPDERDMTKYIIGTFSALDTPMNPEAKGSRSLSAYLEGITYEQIQKERNEILNAQPEDIRRLADLVEAVLKKDSICVIGNENMIKESAGLFENVEKLIMIRQILGEVSVPVANTEVQQVIENPGIVKTYLEKYMPSLISFLVQLVVAIVILLIGIKVIKSIVKIIKKGFDKSRMDAAVASFLANMIKYFLYFILVMALLSGFGVATGSVIAVLGSAGLTVGMALQGSLSNFAGGVLILLMKPFGVGDYIVDGSSGTEGTVKDINLFYTRLLTIDNKMVMIPNGKLADSCITNVSMMDKRMLDLRVTVSYSTDLAFAKSVLQSVVTSADTMLHDEPSNVFVSELQDSAIELGARIWVKNEDYWNTKWQLTEEIKTAFDKNNIEIPFPQMDVNIQKRSIDSDFMFNYTCLNPIAGVGLDLFSDDYKKVDDIKDADAALVRSAAMHDMELGDKVLAVARAGAGVNNIPLDKCAEQGIVVFNTPGANANGVKELVFAGMLYASRDIVGGIDWCLANQNDENIAKTAEKQKKNFAGTEISGKKLGVIGLGAIGVLVANAAVHMGMDVYGYDPYISVNAAWNLSRSVKHISNVEDIYKNCDFITIHVPLLDSTKKMVNADAIAMMKPTAIVLNFARDLLVDEEAMVDALAKGKVKKYVSDFPNNTTVGAKGCIVTPHLGASTAESEDNCAVMAVKELRDYLENGNIVHSVNFPDCSMGACTASGRVGILHKNVKGMIGQITTALAEADINVSDLTNKGKGDYAYSLLDLDSAIDASTVEKLSAIDGVLRVRVIKMSRVYNFSAGPAVLPEEVLQEAAAEMMDYKGSGMSVMEMSHRSKWFDDIIKDAEKDLRELMNIPDNYKVLFLQGGASQFFAEVPMNLMKNKKAGYIITGQWAKKAFAEAKIYGDAVELASSADETFSYIPDCSDLPITDDMDYVYICENNTIYGTKYKKLPNTKGKNLVADVSSCFLSEPVDVSKYAVIYGGVQKNVGPAGVVIAIIREDLITDDCLPGTPTMLKWKTQADNDSLYNTPPCYGIYICGKVFKWLKKMGGLSVMKERNEEKAKILYDFLDQSKLFKGTVRKEDRSLMNVPFVTGDAELDAKFVKEATAAGFVNLKGHRTVGGMRASIYNAMPKEGVEKLVEFMKKFEEENAMQLTGSQVIIECLKEQGVDTVFGYPGGAILNVYDELYKHPEIKHVLTSHEQGASHAADGYARSTGKVGVCLATSGPGATNLVTGISTAYMDSIPIVAITCNVGVSLLGKDSFQEIDIAGITTPVTKYSFIVKDVEKLADTIRRAFNIARKGRPGPVLVDIPKNVTADLVEYTRQEIKLPERETETITDSDIDNAIELIKASKKPYIFVGGGVVLSGASKELKEFVDKVNAPVCDTLMGKGAYDGTSDNYTGMLGMHGTKTSNLGVSECDLLIAIGTRFSDRVLGNPKKFADQAKILQFDVDAAEINKNIRVTSSVIGDVKEILTRINKKLTQLDHNSWVEHVLAYAKTFPLTYHKEGLSGPFVIEKIYEMTKGNAIMVTEVGQHQMWAAQYYKYSKPRTLLTSGGLGTMGYGLGAAIGAQTANPDRTVVNIAGDGCFRMNMNELATASREKLPLIEVIINNHVLGMVRQWQTLFYEKHYSATVLDDGVDYVKLSEAMGATARRVKTQEEFEKAFADALKSKTPFVIDCIIDSDDKVWPMVAPGKPINESFDEEDYNATQGGNMISDNARAGMQQAPARSLFNALGFTPEEMKKPMVGIVSSFNEIVPGHMNIDKIVEAVKLGVAEAGGVPVVFPAIAVCDGIAMGHVGMKYSLVTRDLIADSTECMAIAHQFDALVMVPNCDKNVPGLLMAAARLNLPTVFVSGGPMLAGHVKGRKRSLSSMFEAVGSYAAGTMTEDDVCEYENKVCPTCGSCSGMYTANSMNCLTEALGMGLRGNGTIPAVYSERIRLAKHAGMAVMDMYNKGIKARDIITKDAIMNALTVDMALGCSTNSMLHLPAIAHEIGFDFDISFANPISERTPNLCHLAPAGPTYMEDLNEAGGVWAVMKELADIGLLNTDCMTVTGKTVGENIKNAVNRDPEVIRPVDNPYSKTGGLAVLKGNLAPDGSVVKRSAVVDEMMVHEGPARVFDCEEDAIAAIKGGKIVEGDVVVIRYEGPKGGPGMREMLNPTSAIAGMGLGSSVALITDGRFSGASRGASIGHVSPEAAVGGPIALVEEGDIIKIDIPNMKLELDVSDEVLAERKAKWQPREPKVTTGYLKRYAALVTSGNRGAILALPGEQNAMEYKVGVISGDGIGPEIVTEAKKVLDKIADKYGHSFNYTDILMGGCSIDATGVPLTDEAIATALDSDAVLMGSIGGNTATSPWYKLAPELRPEAGLLKLRKSLNLFANLRPAYLYKELAAACPLRSDIIGDGFDMMIMRELTGGLYFGARETKEVDGVVTATDTLTYNENEIRRIAKRGFDIAMKRRKKVTSVDKANVLDSSRLWRKIVEEVAKDYPEVTYEHMLVDNCAMQLVKDPKQFDVILTENMFGDILSDEASMVTGSIGMLSSASLNDTKFGLYEPSGGSAPDIAGKGIANPIATILSAAMMLRYSFDLDKEAQAIEDAVKQVLKEGYRTIDIMPQPGETTEGITQVGTAQMGDLIAERVMTSILANGQAAGTIGMIVWLVVLFAVMYFLMIRPQKKEQKKKELMLKEVATGDTVLTTSGFYGTVIDIEDDTVIVEFGNNKNCRIPMQKSAIADLEKAEDSAKMAKYELLKQEGRAKRGTFHTVHGDIQTPVFMNVGTVGAIKGAVSTDDLKEIKCQVELSNTYHLHVRTGDKIIKELGGLHKFMVWDRPILTDSGGFQVFSLAGLRKIKEEGVYFNSHIDGAKIFMGPEESMQIQSNLGSTIAMAFDECPSSVADRQYVTNSVNRTARWLERCKKEMARLNSLPDTINKEQLLFGINQGAIYDDIRIDHAKRISELELDGYAVGGLAVGESHEEMYHILDETVPHLPVNKPTYLMGVGTPANILEGVERGIDFFDCVYPSRNGRHGHVYTNHGKLNLFNQKYQKDMRPIEEGCNCPACRTYSRAYIRHLLKAKEMLGMRLCVLHNLYFYNNMMEEIRDSLDAGRFASYKAEKLYGMTQGEQSMILFYLDNFRTMFVYNYVIKGSKGIIDACLHAVLRTTMKQCNNDYNKTAKEGENMEFNGVFHQAYDNYCYPLNEDELIINIKTGYDVKEVNIILGDPFAAGILGGGETWNGDKQPIIFKKKLKHQIWWTTTVKPPFKRLKYYFELITEDERWFYFEDGFVSAEQMALEGRSRQCFVFPWMNPCDIPVTPKWVNDTIWYQIFPDRFCNGDHSIDPDYVVPWRNRGKVKNEECFGGDLAGIIQKLDYLKELGINGIYLTPINESPSNHKYDTTDYAKIDPRFGDEDTFKQLVGEAHKRDMRIMLDGVFNHCGYYFAPWQDVLAKGADSEYYDWFMINEWPLDFKHGAAKKGQFYTFGFFDNMPKLNTNNPAVRKYFIDICANWVENYHIDGLRLDVANEVSHRFCKELRARLKEINPDIYILGEIWHNALPWLRGDEFDAVMNYPLGESIKDFWIDKSQTNQDFEYTINRCYTNYMQQTNDVLFNLLDSHDTKRLRSDTKNLDQYFAQLAVLFAMPGSPCIYYGTEIAMPGSYDPDCRRCMPWDDIEAGRFKERIEMVSKLIHLRASEPLLKGRNFHFPDDFADNPRVIQFRKMGWVDTYVEVIVNCSDEDIEVPKDGEVLFERHCIDTTLLTNGILIRKIVGNGDKMAGSSYGNIFRVTTWGESHGKGLGVVVDGVPAGLELCEEDIQIFLNRRKPGQSKFTTPRKEDDAVEILSGVFEGKTTGTPVSMVVWNKNQKSKDYSEIASYYRPGHADFCFDEKYGFRDYRGGGRSSGRETIGRVAAGAIAVKMLSGLGIKFLTYTRSIGPVTINEVNFDAHEIYNNSLYMPDADAALKASEYLEECLKSLNSSGGVCECVITGLPVGLGDPVFEKIDANLAKAIMSIGAVKGFEIGDGFDAATATGLTNNDAFIMRDGAVSKETNHSGGTLGGMTDGSPLIFRAAIKPTPSIAATQHTVNKSGEDIEISIKGRHDPIIVPRAVVVVEAMAAITIADALLMNMGARMDRITDFYKKLMDIVKNEICKLLTKRTVIILLFLLVLNPVLGLYTMNTVNDDGYTDKDYSALYGEISNYSREDVLPEIEQRQMTAEAYGRISLCSRVYKEVGACLSYDEYLDSVNEKADEISIMNKFSGNGGFAEKNAAKTSRVYSKLKGTVPEVIDASGLLNITDNELTDYVAVIMLFIIALNIVFYEKSENQLALLRTTARGRRQLMASKSFVMIMAVILITLLLYGINAVISMCFYNPINLKSPLQSVYLYYGSPFKLSIGQFLACYFPVKIISFILLGMFFMLICAALDNIIFVFVASAVTVVIEAICYTTISGTSFLAFLKYINIMYGVRTGRLFSDYVNINLFGYPLNTGVLYGLFWLVCIAVCIFAVTNYLNSVHEKKQLILPGFACGKNTGCHTSLFLHECYKALVPGKVLLILIAAALFVVWWNPAEKLSYDSVDEVYYKEYMDKYYGPLTAKTNELLDEERVKYDRLSDNIAYDMAQGKSESYINIKYKDELSRQEAFNKLTAHVDYLKTLKEGWLFFEKGYDILTDRTDFKNRDTAQAFVYVILLIAIACGICGADYANHEIRLLRTTRRGRKQHMGIKCILGFLGTVTAFALVYIVRLCNVLSAYGTQGLNASAASMEHLWRVSQNISVGQYILIIMLMRFIGGLLVSLFVFAMFKYLRSGMSVIISCVLFIVLPLALVAFGVTNAQYFLFNPLLIGNIFMTLELEGLTKVYKDKTALDDVSFSFTPGIYGLLGPNGAGKSTMMNLISDNLTPSKGRVLLDGRGIDELGSEYRKLLGYMPQQQNIYPELSLRRFLYFMASLKGLKKSEAGKDIEHYVRMVKLDDVLGKKLGAFSGGMKQRALIAQALIGNPGILILDEPTAGLDPKERIRIRNLISEVAKDKIVIIATHVVTDVEFIAKEIVMLSNGKIIRSGSPSKLLKELDGKVWNIFLSDNEIDEVNTGYKVSNISRDADGVIARIIADSYDGRWQKEAVRPNLEDLYLYLNGDMMKNSKKKGILIAVAVAVIVVIAVAAVCLNRKTDNAGAVSEGRTESADKTKKSDKADKEESENKRNSDAHVITFAVPDICKIDKNNLKKFNDALAADGHDYELEIKTLSYDNYGQAVEGALENGKTDIAFLGFGDAAGNNPVCDLVRSDLVLNLDDILSGDKGKTLYEAFPKNLWEMVKCDKHIYSIPSALASGEGVVYAAFNRDYVSDDAISAWDGSIDGIYQILQGVKWDKSDTPRFEYLINGYRFDDMLGCEIRNGLCFDYDTMSVGNPLESQKFTGYLRVLDRMKKDGYMSDDLTNEITYLNNPGLNDAQILKNIKAGNFAAALCVGSVDENFKKDNITVKEVKTYLSSRINGSIGVAKKAKDASAAMDFLSLLYGNEKYGNILLYGEKDKDYKLKDGIAEACDGGSLDDDYLTKFSLNLFVNVYPTKNEKYVDNRKKEFFDFYDNATLSPFIGFEPDTKNMGSISTDLDDFMTGLHGATVDDTLDGAVQKLTADGMDSYLESVRSQWEEYKQMKKKRILIASIIFILIICIVTAVFIIKNRNRSTSNTMYTYGSGDVRCNYSEDNVLYLDDSGILHLIDTASGKDMVYCDKPNCTHEGFSGSNEKPSCPAAFYGLEGAGTVLYNDHLYYVGNMSDEDMTVQYLYVMDSNGENRKKAAKLENVQNVTAVLYRDNYVIGAYSNRIELNDEGQIVNDDKPEAGIFVIDLDNYKVYMSDKITSEQANITDIYYENGAVYYSTVRFGDDVTELMIEEGASDDAESFAYDNMLNGIYQYDIADEKTTCLTEIDHINDLRLLDGDGYYSSKDGYFVFDTESRQTRQLPIDADGKTQYGPLKKSGDFLYYALSEEKSDEVTYYRLKDDKSEELMKLSTEKAFSIASICGQSVYVTYTNDNGKLCLGVISLDELNKGVFEPKELRCFDDEEMTFERAMVILFTKVAQTVIAERFTHTFFDNDGNRVRKVFAYLFSVFIAIFVNLFFHKPIFNFLSIFLGLSAIALSYNGTIKRKCIFVFYILAVSCIIDLVVSAFLIKPFGYDGYSAFVSIFALLLLHATQLITERFFENDLGIELNNRYWLFIIASLLVCIITSIVIFMDKTVSSFSLSLVCGAFLLVNIIISYLMDDLVKSSQKALENQALRDQVSSYEREIMLQNENMEALRSFRHDMKRHFAEISVLASTGEIEQIKNYVSAMENNLVESRRLVDSGNTALDTVLNYMLQRAVDKKIQLNVKVVVPCNLNLSAYDMNIIFGNLLENAIEAQKDVKNPSIDLEINYLMDSLVVEISNRCLQKVIFKGGLPVTTKQSVREHGYGLKNVKKVLDKYISTLDFECSDERFTVEILMKIMIYKVAICDDEINQCAVLEKIIIEYFNNRAEKCEVEVWYDSMSLCRDIKEFNPQILFLDIELPGDNGVYAGKYIRETLHNDRMNIVFISHKTSYAMELFQIHPYDFLIKPIDENVLYDTMTKILQLEDVQKKEFRYTYNKTGYSIPYGEIMLFSSRNKTITICKTDGESVSYYGKLSDIVSNLPFQFVCISKSYIVNIKCIKSWKSDAVLLKNGMEISIAQSKRASFKQAVFNYGRSKEVIMFTYFFSLVIIIFEAICCNLFYDVFCKENSRLRKSQKVLLMLSLICCYYLCGLFLSDMLILKMTLVVLAAVIIMSFYFEISIKKSVIFALLYQGLSIIVDYIAYISNNTIISKAGEVQKGYALEGSLVVIFSKITVFLCILLLKKHFGKKSTETLPDKIWGRFLFFPVFTIITIIAMIMTFQYTKNEVQANVLYSISLGLAVMNIFVYFLINDIVTSEAKLHEKEILGLQFKNQIDMYRSISENYEIQKKKSHEFKNHILCIESLLKDHEYDKASKYVRNISNTFIGEKNVINTNHVIINAILNTKYQEAISKNIVFVFKVNDLSKIVIEDEDLVVILANLLNNAIEACEKCEEKKTIKLKFVIEENLIVLSVKNTCSHSIIYSGNEIKTSKKDEPEMHGIGIKNIIQIVEKYNGEYVIKNEDNEFSFSIIIPLMLKIAICDDEKVFRDNINKYVAAYLNEKEISYEIDTFSSGKEIIDLGIEIKQYNIIFLDINMDDVDGIVTAQKIREYSSEIYIVFVTAYINYSLEGYKVDAIRYLLKNNTNLEASISECMDAILHKMNLVVKKKKFKFNEGEKEINIDNILYIESKLHKLQFYIMEDKIKIYNLYGTLNELENELKDFHFIRIHQSYLTNLKYIRSVKCYKVLLCNNQELLIPKARYKNVKDAFISYKGELMRKIELLCPASSLEVLKIAVIYGADAVYIGGEAFGLRAKAKNFSMEEMAEGVAFAHAHGVRVYVTANILAHNYDLDGVREYFTELHNMKPDRPDALIIADPAVFMIAKEVCPEIERHVSTQANNTNYGTYQFWWNLGASRVVTARELSLKEIKEIRGHIDDRMEIETFVHGAMCISYSGRCLLSNYFTGRDANKGACTHPCRWKYSVVEEKRPGEYLPVYENERGTYIFNSKDLCMIEHIPDLIDAGIDSYKIEGRMKTALYVATVARTYRKAIDDYLESPEKYEANMPWYLEQIKSCTYRQFTTGFFYGKPSEETQIYDNNTYEKGYTYLGIVGAPNEKGLYRMEQRNKFSVGEQIEIMKPNGDNVLATVLALVDEDGNEMESCPHPQQVFYVKLSETPDEFDILRRQENEAIALDMIVDERLVTYINSLDRGNTPVLDEIEKEALRDFVPIIRKEMQSFLKLLLAMQKPMRILEVGTAVGFSAVLMAEYAPKGCQIVTIENYEKRIPIAKANFERAGKQEQITLLEGDATEILPQLEGQFDMIFMDAAKGQYINFMPQVLRLLKTGGVLVSDNVLQDGDIIESHYIVERRNRTIYKRMREYLYELTHSDELVTAVMPIGDGITVSTKLMDFNKALFGFIRVAFSIMIALLVLFAGIKICSICYDFGYRVFTEPAMTNGEGQDVLVHVEKGISAEELGQLLEDKGLVRDHNLFYLQLKLSAYSGHIKPGIYTLNTSMTAKDMMVIMSSDKSDEEQTQTTEPSDTQMKKTEKQNTGKLKIIPLGGLEQIGMNITAFEYEDSIIVVDCGLSFPEDDMLGIDLVIPDITYLKENIDKVKGFFITHGHEDHIGAIPYVLKEINVPIYATKLTIGIIDRKLEEHGMLKTVKRKVVKYGQHINLGCFRVEFIKTNHSIQDAAALAIYSPAGIVVHTGDFKVDYTPVFGDAIDLARFGEIGKKGVLALMCDSTNAERPGFTQSEKSVGKVLDGIFEDHRKNRIIIATFASNVDRVQQIINCAEKYGRKVAIEGRSMVNIISIASELGYLSLPDNILIDVEQLRSYPDEQTVIITTGSQGESMAALSRMANGTHRKVSIKPNDTIVFSSNPIPGNEKSVTGIINELMMKGADVIFQDVHVSGHACQEDIKLIYSLVNPKYAIPVHGEYKHLVAQAKIAEQLGYDTDHIKILSSGDVLEINEDGAKVTGRVHVGNVMVDGLGVGDVGNIVLRDRQRLAEDGIIIVVMTLEAGSGQLLAGPDIVSRGFVYVRNSESLMDEAKCVLDDTMERLTDNNVTDWGKIKTEVKDALGDFVWKETKRRPMIIPIIMEVMQKIKFTDPQTNDVVEFAVEEETTLNGTRYLLVSEGEESGDCEAYILKEVSTKDEEVLYQMVEDDVEFSAIAKVFSELTDDDTALEYMRILGLDFGSKTVGVAVSDELLITAQGVEIVRRKSPSKLRQTLARIEEIIAEYKVDRIVLGYPKNMNNTEGERCEKTKEFGDMLARRTGLEVIYWDERLTTVAADRSMMETGIRRENRKEFVDEIAAIFILQGYLDYLSNSRSMEKNINNTQFFTVQKEPELQVSDVLEIVYKALKEKGYNPVNQIVGYIMSGDPTYITSHNNARSLIMKVERDELVEEVLKTYIENSAWDMKKAALHNLGCKVNAYETEAMQHLLEEAGYEIVPFTQKADVYVINTCSVTNMADRKSRQMLHKAKKNNPDSIVVAAGCYVQTSEKEVLNDLSVDIVIGNDRKHDLVRLLEEYSLDSVNDTVDDINDGKHDFEELFIDQTKEHTRAFIKVQDGCNQFCSYCIIPYARGRVRSRRFENVIAEVERLAANGFKEVVLTGIHLSSYGVDFEEATGLLELIQAVNAVKGIERIRLGSLEPKIVTEHFASELSKLDKICPHFHLSLQSGCDATLKRMNRKYTTKEYERGCELLRKYFVHPAITTDVIVGFPGETEEEFEQTKAYLEHIHFYEMHIFKYSKRKGTRAAVMPDQIDEQIKAARSEKLIALGHDMSKEFRKFYIGKNEEVLFEEKAVIGDKEYFVGYTKEYVKVAKKTDENLENQIVSGRISGMLTDEILLFEMKTVQISLNSIGKVKSFVNAITQFDFDFDLISGRYVIDAKSIMGIFSLDLSKPIELAIHTETGLDEIMEVLKPYIIDEAKMYKTFLIKYAEIAIKGKNRYIFEDALVKNIKYQLRNVDGSFEVRKESGRVYVETDGDYDYDETVATLSRIFGIVGICPVELHEDEGFDKLCEAVIEHINHVYKDKSFTFKVNARRARKNYPMTSMEINAAVGEKVLEAFPETRVDVHNPQVMINIEIRPMINIYSEEIPGPGGMPLGTAGKAMLLLSGGIDSPVAGYMIAKRGVVINATYFHAPPYTSERAKQKVVDLAKKVARYSGKIKLHVVNFTDIQLAIYEKCPHDELTIIMRRYMMKISEHFADEDKCLGLITGESIGQVASQTMQSLAATNEVCHMPVYRPLIAMDKNDIIDISNKIDTYETSILPYEDCCTIFVAKHPVTKPNINRIKKSEERLNDVIDELMKTAIDTTEVIMVDAEMEAYLDNSATTRCSKAAADMVYKLLTEDYGNPSSLHMKGVEAENYINDAKKKIAKTLRVQDKEILFTSGGTESNNTAIIGAAMANKRAGRHIITSSVEHASVLAVMQFLEEQGFEITYLPVNHDGVISVEELKNAVREDTILVSLMHVNNEIGAVMPIEEAGAAIKEKNPAALFHVDAIQSYGKLEIRPKRMNIDMLSVSGHKIHGPKGSGFLYIKDKTKIKPIIYGGGQQKGMRSGTENVPAYAGLGVAAEEIYTDFDKKIAHMYELRDHFIASVQRIDGVSVNGRIDHTNAPHVVSVSVDGVRAEVMLHTLEDRQIYVSAGSACSSNKPAISSTLKSIGLKPSLLDSTIRFSFCVNTTQEEIDYAVSVMAEVIPMLRRYTRRMYQFFVEEEQVHSDSISITGGDVNHIKNVLRMKNGEKIRVSSKSGQAYFCHISSILDDEVIAAIDSADETGTELDNHIVLYQGLPKGDKMELIIQKAVELGVSEIVPVAMKNCVVKLDEKKALKKLQRWQAIAESAAKQSKRTVIPTVKQPVTYREALKIASELDITLVPYENERGMDATREIMGQLKAGQTIGVVVGPEGGFAPEEIALVDEHATMHRISLGRRILRTETAGLAALAMLVYNLDVMKWKKYTIETTTAAEDFMSSMLMELGIEGIEIEDNIPLTKEDQADMFIDFLPELPPDEGISHVSFYIEDDGSDQSDMLRKVKLGLEDLRDTVDVGSGVISSSETEDLDWINNWKKYFSSFTIGDILIKPTWEEVKPEDADKFMIEIDPGISFGTGKHETTQLCIKQLIKYIEGAKEAPTVLDVGCGSGILSIVALKLGAKEVVGTDLDADCMISTRDNMQVNHLDEELGTFYVGNLIDDTELQKKVGTEKYDIVVANILADVIIPMAPVIPDRLKEGGYFITSGIIDFKENEVKEAIEAAGLKVIEINHQGEWVNITAQKQAKMAEKRDYYEVLGVSKTATDAEIKKAFRQQAKKYHPDIHPGDKECEEKFKEAQEAYAVLSDPDKRRQYDQFGHAAFDGTGGGAGGFDFSGMDMGDIFGDIFGDFFGGGRSSGRRNGPAQGANVRLSVRISFEEAIFGCTKELEFNYKETCSTCGGNGAKPGTSPETCTQCNGTGKVVRQSQSLFGVVQNVTTCPSCGGSGKVVKDKCPTCHGTGYNTKKVRKTVEIPAGIDNGQCVRIREYGEPGINGGPRGDLLVEVIVSGSRDFERQDVNIFSKASISYAIAALGGDIRIKTVDGDIIYTVAPGTQTGTRIRLKGKGVPSTRNKAIRGDHYVTLVVNTPTGLSKDAKEALKKFDELSGGSLTKEGGASTDSKKKKGFMDKLKESLDDLMGKIIGIDLGTTNSCVAVMEGGKPTVIANQEGARTTPSVVAFTKTGERLIGEPAKRQAVTNAEKTISSIKRHMGTDYKVQIDDKSYSPQQISAMVLQKLKADAEGYLGEKVTEAVITVPAYFNDAQRQATKDAGKIAGLDVKRIINEPTAAALAYGLDNEKEQKIMVYDLGGGTFDVSIIEIGDGVIEVLSTNGDTHLGGDDFDNKVTQWMIDEFKKAEGVDLSTDKMALQRLKEAAEKAKKELSSATTTNINLPFITATAEGPKHFDMTLTRAKFDELTHDLVERTAIPVQNAMKDAGVTNADLGQVLLVGGSTRIPAVQDKVKQMTGKEPSKSLNPDECVAIGASIQGGKLAGDAGAGEVLLLDVTPLSLSIETMGGVATRLIERNTTIPTRKSQIFSTAADNQTAVDINVVQGERQFARDNKSLGQFRLDGIPPARRGVPQIEVTFDIDANGIVNVSAKDLGTGKEQHITITAGSNMSDDEIDKAVKEAAEFEAQDKKRKEAIDARNDAESFVFQTEDALKQVGDSVDAADKSAVEADIAAVKSFLDAHKEAEAMTEADVAELKAAQEKLTQSAQKVFAKMYEQAQAAQGAAGAGPDMNAGAGQAGPDMNAGASNGADDDVIDADFKEVMMCTSIRHDSESDLYECRQHLMDSCETTDGYKYIKHVKTLYLIGGKMPEDIKKETIDNETAENKAEEIEIEGADEESTQTAEETKNTDVNEAKSEDEASADADEKKGLFKKKKKDKKDEQIEELNDRLKRQMAEFENFRKRSEKEKSQMFDMGAKTIVEKILPVIDNFERGLAAVPDDKKDDPFITGMDKVYKQMLTELDAAGVKPIECVGQEFDPDFHNAVMQVENDELESGTVAQELQKGYMYKDSVVRHSMVSVVQMENENKELELSERQLTILDAIIRNYLATGEPVGSRTISKYTDLNLSSATIRNEMSDLEEMGYIVQPHTSAGRIPSDKGYRLYVDHLIETNDKKEKELSDMKELVIENTEKMEQVLKQAAKVLANNTNYATLVSAPDVNHNKVKFIQLSQVDDQHLLAVIVMNNNMVRNKMLDLYEPLDNETILKLNILLNTSLNGLAMNEINLGNIASIKERAGIHSGIVSDVIDALAQTFAESEDLKIYTSGATNILKYPELSDSNNAATLLSAFEEKEELASLVTESLSDSEKKDNGTGIQVYIGNESPIQTMKDCSVVTATYDLGEGVKGTIGIVGPKRMDYEKVMDNLKTLKSQLDGIYKKSEDETMNMWGLLMIILAVLSAAGILYLASRIGRFWIIKRIAKEKRNICFLIGLIILIALSASIWLAWGYMNAIVCILHLLVFWLLAEGIFTIIQKIRKKEFKRYYAGITAVVFTVCYLGAGWYCAHHVWQTSYEIHTDKSVGNLKVAVFSDSHVGATFDGEGFAGHMKEIEAQSPDIILIVGDFVDDDTSKADMVRACRALGELKCTYGVYYTFGNHDKGYYPSDYRGYSGADLKENLEKNNVHVMEDNVELIDNRFYIIGRADKSEEYGAGRKNMEELVKDLDPDKFSIVLDHQPEDYASQADSGVDLVLSGHTHGGQLFPLMTVEKLTGMTPDDRIYGYEKRDSTNFIVTSGIADWAIKFKTGCKSEYLMINIQMSIKKLIPAILIGTLACVNIAGCTSSKDREATKTKQELKSTQIESNNGESSKVLVVYYSASGNTKAVAENIAEETDGDLFELVPTDVYTSDDLDWTNKNSRVTQEHNNPETRDVELEYNTVDNWDDYDTVFIGYPIWWGIAAWPVNSFVQLNDFTGKTVIPFATSTSSGLGDSGELLKKQAGTGDWQDGKRFPSGVSADEVTGWINDLELNKMEKRILGRDLEVSEIGLGCMGMSHAYGTVSTEKEAEALIDKAIDCGCTFFDTAEIYGTAEDPHHNEKLLGKILKPYRNKIVLASKCGIRFDETATTVNKPLIPDGRPETIKSSIDGSLKRLNTDHLDLYYIHRIDPTVPIEETAGAMKELIEQGKITHWGLSEADEDTIRRANKVCPITAIQNRYSMMYRDYEKLFPVLEELGIGFVAFSPLANGFLTAVYNSHAQFEKPGDYRSMMPQFSDEGIKENKEFILWIKLLAEEKKATPAQISLAWMSAKKPYIVPIPGTRKVSRLEENMKASEIKLTKDEVKAIDEMLDSIPMSQVFGGSKIQKKMSFNFSIPTNALFGAGKLNELHTQINTPMGAVHGSKALVVISNGKSTRANGYLDRLENELKQSNVEYVIFDKVGSNPTKPVVEEGGKFAKENGCDFIVALGGGSVMDASKAIGIMATNESDDLWDYVMFGTGKKQWPPMPSLPIVAITTTAGTGSETDGGGVITNPDTQEKTGVFGTGTMPVLAIVDPELMTSVPAAFKAYQGFDALFHSTEGYISANRNEFSKMVAAEAIRNVSCNLVTSIREPENIEAMSNVAFGSYLSGIQMTVGTCVSAHPLEHALSAYHEKLPHGAGLIMISKAFYSFFIDKHVCDDRFIEMAKLMGMEDAKKPEDFITMLVKLQEDCNVTDLKMSDYGITPEEFPKMAENARATLGINFENDMYKLTDEDCVAIYQGSYKMEFWKSFTEKHPKLSKWVYQIFYFFVFSMGVTIFQYLVFTFMPHILGIGLAGTEFMWPRKNMNILGVKFTWSLLGYDVLRDASGAVMIGGGLGYFISYETGSFLAQCINFPLQRNITFKSKGNPVYQAIWYFLAWVVISLICNGLNNLWMPIAAVYVPPAIYNILVTFITGGVSMIIFFFVFKIIFPEGEKKMKHKEIIDKMTLEEKAALLSGKGEWQTWNLDRLGIPSIYCSDGPHGIRKQAGTGDHLGLNPSLPATCFPTAATVANSWDPELGDKIGQALGQEANTQGVDIVLGPGLNIKRNPLCGRNFEYFSEDPYLAGKMAAGYIRGIQSQGVYACPKHFAVNSQELRRMAMNAVVDERTLREIYLTGFEIAVKEGHAKAIMTSYNQVNGTYANENAHLLTDILRDEWGFDGIVITDWGGSNDHVKGVQAGSDLEMPNPGLDSARQLIKAVKEGRIKESTIDNSVDRMLEAVFELSQEREKIDDKGFKKHNDLAYRAAAESAVLLKNSDNILPLKPDTRVALIGDFAYVPRYQGSGSSVVNATSVEHMNMLINNTTLHVVGCTRGYLRSGGIDAIMEKAAIDLAEQADVVIYCFGLDELSESEGVDRNHMRIPQNQIHLLEKLVKVNKNIVGVLSAGSAIEMSWHHCLKGIIHGYLYGQAGAQAMLDIITGKINPSGRLNETYPVRYEDTPSLRYFPSVERNSEYREGIFVGYRYYDTANIRVLYPFGYGLSYTNFKYSDLIVNNDGIRITVTNTGDVDGAETIQLYIGKKDAKIFRPDKELKGFKKVFLKAGESRNINIDFDDKTFRYWNIITSKWEVEAGEYQVMVGADCQDIRHTGQINIDGTTTEYPYSKDHMPSYFSGNIQKVSDKEFEELLDRTIPDGKWRGELDVNDAVCQMYYAKSALARFIYKILTNKLKKNEELGKTDLNLLFQYNIPFRAIAKMTGGIVSMEMIDGVMMVVNGHFFKGFGIVITGFFRNRRLNKKYIKKLNSNGGKMGNVEVAWEDVISVINMVRTHLIIIAIAFIAMIAVMIIVRKKEKLIKRMIRFQSFFAFLLITVVTLNVAAAETLYNTLNVVLSDKGTLDQGHIDNSKKVIEDVTNEGVVMTKNDNSFLPIVPQKINVFGWSSTNPVYGGTGSGTVDATTAVGILKGLENAGFETNSELSDMYTEYRQDRPVISINDGQDWTLPEVPAADYSDKIINDAKDFSDVAMIVLSRTGGEGTDLPIDMGPIMDGSTMDIGTKYTKGTYTNNSKDYDDFEDGQSYLELSKTEQDLVDLVCSNFDDVIVVYNGANAMELGWTNDYEQIKSVLLCAGAGATGFNALGNIISGEVNPSGKTTDTWLKDINKAPYINNIGHFAYTNTDKVSDAAKKAWERADGIVSFVDYVEGIYVGYRFYETAADEGLINYDDTVMYPFGYGLSYTTFDETMGELRASDDGISVDVTVTNTGDTAGKDVVELYYDPPYYNGGIEKSSVNLLAFDKTDLLEPGESETVTLTFSDEDMASYDTYGAGHYVLEHGDYDISLRTDSHNVVDSKTYNVAEDIVYDENTKHNGDVEVADNKFDFVEGDITYLSRKDGFANYDTATAAPTNFELDGTIYGNGTYDPTDYDNDDDKMPTTGADNGLELFDLRGASYDDDRWEDLLDEMTVDEMVDLIAFGGHQNIAVRSIDKIRILDTDGPAGVNSSTLGIFGTGFCSEIILAQTWNTELAVAFSEAMGQEFADYHVTGWYAPSMNIHRSAFGGRDFEYYSEDSKLSAEMAKAEVEGIVNAGMYPFIKHFVLNEQEINRNAFLTTWSNEQAMREIYFKPFEDTIKAYPDGKIAVMSSYNFLGTEWAGSCTQLLNDVLRGEWGYKGMVISDYFGNYGYMDADRAVRGGTDMMLGTAGNDAIMTDLSATSVIAMRKAVKNILYTTVNSSAYENYVPGETPGWLKMIYAADAILAVLLIAAEAALIIRYRKKRNNDQIIVTDGEMTNMQIISCIRFCIQLLITESIYTFAFERRKHFIIKAVAAICMYFSVSLLIFELLSAVPWENPVISIVYYIGIFACSLLSMAICFKDKVEEILFAGICGYATQHIAYAFITIIQQIIDMKLNVYIDFIVIRILPYIVISAAAYFFIVRHYEGKSEHKQKDIRMITLALVILFIVVVNSVLVDSTMFSGDSSRLQNVFCKMYAIVCCILAVFMAFNMSRQNQIIREKEMMEQMINNMGEKQKLSKETIDIINIKCHDLKYRISKITRIEDADEQKKYVDDVRNALAIYDNIFQTGNEALDLVLTEKSILCTEYRIKLSTMVDGSMLNFMKTTDVYALFGNLMDNAIESVIKEEDDEKRIISISVKEKNKGAHIHIENYCNEQITFDDGLPVTTKEDKNYHGFGVKSIRYIVDHYHGTMLMRTDKMKFITDIIFFPEQMIRVGLIDDDLEHQKMICEFINTYKNETNTNFEIVQYTDGLNFIEEYRGNLDIVFLDIEMPHMDGMTAARKLRKLDSGIAIVFVTNMAQYAIHGYEVDAIDFIVKPISYYVFKDKLEKAMRSLELNKDKTIIVHDNDSVMKIKVSQILYIEKNKNYLVFHTKQGEFQARGTMIDIENKLQGEGFSKCINGCLVNLKYVSKMCKDSVWIEDVCLPISRQRKKKFKDDFMRYLGGDFMVHGTNPDEVKQDLEGMQVMQVLGNNMAYFINCKNVASKMGIEMPQAPAFVFTNFIHMKNKKLTVKIMIDIGMTACLLLLMPYSLLGETLHEWIGMAMFVLFIAHHILNRKWLATVAKGKYTLFRGVQTALAMIMFILMIGSMISGILLSDHIFGMVRIEGSYMMARQVHMFCAYWGLIIMSLHLGMHWNMAVIMVGRIFKQPSAVRKWIARAIAVILAVYGVYAFIKRQIGDYLLMKMHFVFYDYTESVLFFMADYLAVMILIAFIGYYAGLLMKKYKTRMRIKIMIIACALVITTFSACGRTNREKQTDAENTQNTQSEGSNDMTWNNDSLYDIKGGYTAKSRISDVINDPVFEDYGRLIFPTDFKIDDDLKLSEVSSILPWYSEVNTDKTVEIVNYMKNQSESGNRIFYNIYSEDEMQADPEKRNTGLFFFRGNAGEKTAIINAGGGFVYVAGIHDSFPQALEISKKGYNAFALIYRPGAQTACEDLARAIAYLYENADELQIDMTDYSLWGGSAGARMAAWLGSYGTAYFGEDSYPAPAAVIMQYTGLSVVTGNEPPTYACVGMSDGIASYRSMERYISQIKKNGTNAELEVFKGLSHGFGLGQKTVAEGWIDRAVSFWQENTKMMYNPQLDTFICVVESGSFSKAAEKLYISPTAVIKQINSLEASLDLKLFSRTHRGLVVTDAGQSIYNDAKYIVGYCKDSIRRAKEAMDVSDNVIRVGVSPMTPPAVFVELWPKIQKIYPDMKFQLITFENTIENAREILANLGQNIDVVAGIFDETMLKLRGCDATEISREPFCVAVSIHHRLAKKEKITLDDLKGENLMLMKRGWSYYGDKLRDFIAVKNPDINIVDFDLYNIEAFNRCENNNEVLLAFKSWESVHPLIRIIPVEWDYTMPFGILHSKEPSEKVRRLIKAINKIKAMENSYKYFKNTECKYFPCHKGLDDFNCLFCYCPLYEMKNCPGNKRYIEKNGKPLKVCTDCTFPHKPENYDIIIEILKRRMKINRFMIAAPKSGSGKTMITCALLQLLKDSGKNVLSYKCGPDYIDPMFHKKVLGVSSKNLDTFFTDEKTTVQLFLDERADGDFAVLEGVMGLYDGLGGRYEQGSSYHLAKVTQTPIILVVDAKGMGKSVLALIAGFLQYDTHHLIKGVLLNRMSKGYYDIIKPLIEKELSVKVVGYFPEQKDIGLSSRHLGLVMPDELLDIKKQLNETADRLKKTIDMDLFIDIAEAADEISDSENADVYNEKNIGNCDQNEFSQNKAINTVNIAVAMDEAFCFYYEDNLRMLEKCGAKLQYFSPLHDTRLPKDCDAMLLGGGYPELYAKELSKNVSMLNAIKKAFIAGMPTVAECGGFMYLHKYIHDICDDNDEQNKPDVQNKADIQNDMNKSKLVGALDGGCHFKGKLVRFGYIELAEKHSNFLPPNEKIKAHEFHYYDSTDNGADCIATKPATGRSYDCVISHDNYWLGFPHLYYPSNPHFAESLVRKAYEYEYRRNKNGKLLMSKILIFAGTTEGRKLSEHLCERGIEHTVCVATEYGEIVLHENPFAHVHMGRMDSEGMRSFFAEQKCKLIVDATHPYAAIVTENIKQAVYAFNETHAVTDNQADSSISENIEYVRLKRDTDISADYDNIRYFEDNEACAKALNNTDGNILLTTGSKELSVYCKTLDVRERLYVRVLPGLESISLCMNNDITGKHILALQGPFSTQLNEALIDQYDIRCLVTKKSGAAGGFIEKITAAKNKNIPVYIVGQSVQDDGMSFEAVCEYIDSKYNKLHIMLAGIGMGNDACMTKAVSDAIESADIILGASRMIEKYSAKIDKKPYYLAEQIIPYLYEICADTAKISNVLILFSGDTGFYSGSRKLYLVIKNEISEGKLNADVSILPGISSVSYMAAAVGDTYNDAYICSIHGVKLSNITSRISHHAKTFMLMSGVKDVNMLGHLLSSDERYGLQKCSVTVGYQLSYPDETISQLSPQECTKLKREGLYICMIKNPNPVAKNVTPQLSDAAFIREKVPMTKEEIRHVSICKLHLKSDSVLYDVGSGTGSIAVEAASLSDDMEVYAIEQKENAVQLITQNKEKHGLENIHVINAKAPDGMDTLPVPTHAFIGGSGGNLKEIIEALKAKNPHIRIVINAISMETICEIKEILSAYDVKNEDIVQLQVSRSKQIGHYHLMQAENPVWICSFEFMNKIYIVGMGPGFESMMTKQAIDALEASDVIVGYTVYIKLLGEKFQTKELLTTPMRQEKERCHLCFKKALEGKTVSLVCSGDAGIYGLASLMYEIGQEYDNVELSVIPGITAANSGAAVLGAPLNHDFCTISLSDLLTPWDKIEKRLVAAAEGDFVIALYNPSSHKRKDYLMRACDILLRAIEPDRACGYVENIGREGTSYTVCTLGELRSAQVNMFTTVFIGNEGTQIIDGKLVTRRGYQIEMKICIVSFTKKGYELSCDIAYKLKKSAYEVEVFTKCSRLSDVNIKNSTDENYRNTGYISQNISDWTAAQMSEKKALIFIGACGIAVRAIASSVNNKLKDSPVIVIDELGQFVIPILSGHVGGANELAVLLAALMNATPVITTATDINNKFAVDVFAKKCRLAIVNKDGIARVSSKVLAGKVVTMSVDWEHIPAKHRSLIKAFLDEADMSADAIKTVDFPPVYGVDIVVSCEKAKDPKNGSIYLKPTQFVLGIGCRRDTAFENIDRAIRQSLLKLQIDISDIDMIASIDVKKDEPGIKEFCDRNRIEFVTYTADELMAVQGEFSASQFVREHVGVDNVCERAAVLACSRECNKAGELIYKKHKYDRVTVAAARYPDMVYFVGAGTGAADLITVRGMRLLQKADVIIYAGSLVNPELLDYAGESCEIYNSAKMTLDEVIAVMKAAEADGKITVRLHTGEPSIYGAVREQMDELDTLLIPYESCPGVSACFGAAASLNIEYTLPGISQSLIITRMEGRTKVPPKESIASFASHHASMAIYLSTGLLEKLTESLIEGGYEADTPAAIVYKATWPQEEAYVCTVATLEQTAREHNITKTAIVLVGDVIAHRHYEKSRLYAPDFSTEYRKASVESKDNNMRYGFTTGSCAAAASKAAAYMLLTGKAKNKITIQTPKGIAYTADITDIKRSENEVSCAVIKDGGDDPDVTTGAYIYASVRILHSDTCALCKKKQDLVIINIDGGDGVGRVTKPGLDQPVGNAAINHVPREMIEKEVREVCELLDFKGTLDITISVPKGKELAERTFNPRLGIVGGISILGTSGIVEPMSSQALIDTIRVELRQRYSFGYDYVAVAPGNYGLDFMKESYGYDLDRSVKCSNFIGETIDMAADMGFKRMLLTGHIGKLIKVAGGIMNTHSREADCRIELLTAFAFKCGVAPEYIKHIMDSLTTEEALEALKESGRLYEVMDYAMERICFYLDKRAKGRLEIDCIMYSNEFGELAKSRKAEKWFTLLAQEQAQQIMKKIKQLEPMEIEKRSFEIISHELSEMQITLPADQEMITKRVIHTSADFDYIQTLKYSKDAVAIAKRLISEGADIVTDTNMALSGINKKYLAKFGGQAHCFMADDEVALIAKEKKTTRAAVSMEFASRIDKPVIFAIGNAPTALIELYDMIEKGIYKPAFVIGVPVGFVNVEAAKELIMETGVPYIVNVGRKGGSNIAAAICNALIYSLVDRGMKSIHGGDIYNNKVNMDFSVNINPLGIPHSVKEAMSDALSYADRYPDMACSGLKKAISEYFTQQGCSIQSEDVIPGNGASELFMAIAHAIKPKKAVLPAPGFFGYEHVLRAVGCDIGYFLLDEQSDFSPAARRDALMDMLTDDTDIFFIANPNNPTGYLADSTFMKQIIGHCKEKSIYVVADECFMGFCEKKYSVLSLLCDYDNLIVVRAFTKLFAIPGVRLGYMISKNEAVRQKVQRNLPEWNVSVLAQMAGEACIMESEYIKETASYVSGQRRLLSDGLKKLGFNVYKSDADFILFYSKLPLYDILLNKGILIRDCSNYVGLSEGYFRVAVKTYDENVRLLKVIGECIEKNMCYHIFAFIAGFVLDLLIGDPHFIPHPVRLIGSLISFLDKRLNCDAGYNSSEKKLNLIKYKRGMLLVFTVIFATFAMSVIIIVAAYSINLYAGVIAEAVMTWQILATKCLRVESMRVYDALRTDGVDAGRRAVSMIVGRDTSVLDAAGVTRAAVETIAENTSDGVIAPMLYTAIGGPVLGFVYKAVNTMDSMLGYKNDKYMYFGRFAARLDDVVNFIPARISAYLMIAAAFIGGRHFDGKNAYHIFKRDRFNHASPNSAQTESVCAGALRVQLAGDAVYFGKLVKKKYIGDGLREIEYEDIKRANRLMYITAFLCELLSVAVMSLVLILLMWNRSENKINCIFIRHGCTVSNREHRYLGRTDEPLDEAGVFELENALNNGVYKALEKNSLKEQIIITSPMRRCKQTAEIILPVAQHHKIHTVKEFAEMDFGEWELKSYNELSTDIRFRDSYQAWIDSGGTLAFPNGESRKEFCKRSICGFERALTQALELKRAMPDKEIQIVFFVHGGTIMAIMSHYCDMDYYDYQVKNGCGYSCEVAVEGNEIVFNEIVPISLMKLVIGGVAQGKLDYVLENMIEKTEKYDVYDCFFLKNNACNDKASNMEWPWDFAVDDESILIIDKFHYFIRAVLEKNLPLQEYILKFMQFAEENKDTIVIADEIGNGIVPLDAFEREYREQTGRAEILLAKKADEVVRVICGIGQKIKMKLIRSCIVSFSMYSKIPMPQFKWNDDDMKYMLVFFPWIGAVIGLLLMLWRYIYSHFGVADICYVCIGALIPIAVTGGFHIDGFMDTMDAFHSYKPREEKLAILKDSHIGAFAVIMIAAYGLLFMGAFSQIMNDKAFIVFCAGFFISRCLSGIAVVSFKSAKSDGLLFMFADTAHRTIVRAVLYIQLALCMAVLFIVSLPYAVAMIIAAALSFWYYYVKTKKELGGITGDTAGYFVCICECAMAVALGGVSFIIMITLITGGSGSGKSAYAEKYICHVSNEKGYKEKYYIATMQVFDDEGQRKIDRHRRLRVGKGFITIEQPRDIKNAVSKLQSENCLKTGRSALLECMSNLVANEMFPPVDASGIQAAEAEKEALDATEKMKDYETAQISRVSKKVLKEVSILSENVAELVIVTNNVFEDGVCYDESTMNYIKAMGIVNRGLAAMAERVVEVVAGIPVAVKMIENNIISDHFTVEELKKLKITPPDAKMYKKIRSNWDSVAKPLDGMGDFELLTAKIGAVLGDENIDISKKAVIMMCADNGVVAEGISQSGQEVTLAVAKSMARKASSVGRMAMTAGADTIPVDIGINSDESVKGLLQRKVRMGTRNFAKEPAMTRAETLEAIAAGIEIVRGCKADGCRIIATGEMGIGNTTTSAAMAAAMLRCDVATVTGRGAGLNDSGLEKKIRVIESAIEKYDLYNKDTFEILMTVGGLDIAGLVGVCIGGALYHIPVMLDGVISMVSALAAGRLLSGVTDFIIPSHEGREPAVALLCEALSVRPVIRASLALGEGTGAVMMFALLDMALSVYKGRTTFDDISVSQYERYVMAKVIMVQGTMSNSGKSFLVAGLCRIFRQDGYRVAPFKSQNMALNSYITDEGLEMGRAQVMQAEAAGIKPMVCMNPILLKPTNNTGSQVIVNGRVLKNMPAREYFAYKKTLIPDIKKAFKKLEEYADIIVIEGAGSPAEINLKENDIVNMGLAHMVDAPVLLVGDIDRGGVFAQLLGTLMLLTDEEKNRVCGLIINKFRGDKTILDPGIQMLEERGGVPVTGVVPYMDVQLEDEDSLTERFDKKTDGLIDIAVIRYPRISNFTDFNVFEQMSEVTVRYVSTVNELRHPDIVFLPGSKNTMGDLLWMRQNGLEAAVKKLSCEIPVFGICGGYQMLGASIADPDGVEEGGYMRGMELLPIDTVLKDSKTRLQTSGEIAHVDGVLSRLSGCHFLGYEIHMGKSAYSTASDEQGACVDRKNELNNVISDGRNVYGSYIHGIFDTAEAARVIVDYIADKKGIDVNDSTIVSYKSFKEKQYDRLADTLREYLDMDAVYGMLREAKYDMEYYFTAQKLAVGYDNRPLIENIDFSLKRGEILTLIGPNGAGKSTILKSIARQLSLVSGTIYLDKSDVVTMNGNEFAKKMAVVLTDKLKTELMTCYDVVATGRYPYTGRFGVLSDEDKKAVDEAMELVNVSQIKDKDFTKISDGQRQRVMLSRAICQQPEIIVLDEPTSYLDIKYKLEFLSILQRLKRQKNLTVIMSLHELDMAKRVSDHIMCIDGSYVDRYGTPEEVFTDQYVSGLFGITAGSFDETGEDLELEKPDGIARVFVIAGGGLGRKSFRSLQRKGIPFATGIIYENDLDYPAAKALSAEIVSARSFEPVDDALIEKAKELIDACEGVICDRTEFGTYEQFNSRLYEYAVSTGKIIKIHFLEEQLAQLMEKTRKIRCFTTFIILIILIIILLIMNVCIGTVHISFKAAFATLYDHSDRVGRIVWDIRMPRAIAAMILGGALALAGYLLQTFFHNPIAGPFVLGISSGAKMIVALVMVFLLGNAIRVSSLAMIAAAFLGAMLSMGFVLIISRKVSSMSMLVVSGVMIGYICSAVTEFVVTFADDSDIVNLHNWSRGSFSGMTWDSVGVMSIVVGITFIFVFLMSKPLMAYQLGESYAVNLGVNIKSIRVLLVLLSSLLSACIVAFAGPISFVGIAVPHIVKSMLKSTKPIYMIPACFLGGAVFCLFCDLLARMMFAPTELSISTVTAVFGAPVVLFIMIRRSKEKNVMHGRKKIIIYILISIIGLFWLSGCDSPSSDSGNTESKAEAEAQNGLIYKSSMKLLYAKNFSVDYYEGGYKILTTKDGTQILTVPKGRKTPKDIDKDIIVLKEPVSDLYLVASGVMDMFDKLDAVDTIKFSGLDSDGWYIDSARKALESGRMLYAGKYSKPDYELLVSENCSLAIENTMITHSPQVTEKLKSFDIPSIIEYSSYEEEPLGRVEWVKFFGALTDRDEKADELFNEQVDIVNRIAKTDTAANDDSRPTVAFFYITSNGQVQVRKSTDYVPKMISLAGGKYIFDASNDDDTGRSTMNMQLEDFYNGAIDADYLIYNSAIDGGVKNLNELLDKCPVLADFRAVKNGNVFCTTNDMYQQSMSIGYMIDDMHSMITGAPDSGMKYLFKLNRKINSTKRMRKLFRNKFTYIVAMTLVCAMSLAACGNKNAKAETESKKAVQNATESTKKAEKTEKIALSDGTYTAEFTTDSSMFHVNDAYDNKGTLTVKDGKATIHVALTSTHIVNLFLGTAKDASKDKAELLEPTVETVDYGDGTTEEVNAFDIPVPVLDEEFDLALIGTKGKWYDHKVKVSNATPADADASVSESAGKELPDGTYNINLDFEGGSGKASIASPAEVTISGGAAIATVQWSSPNYDYMIVDGQKYMPVNTDGNSVFEIPVKLDTPMQVIGDTVAMSKPHEVEYTLTFHSDSATEVLGEDGEMKKKLVVVLMAAVMAMTAVTGCGSKADDAKNDTQASKTSESETSADADQEAAMHVADLIDAIYVQERTDDTDKQCKEAKEAWDKLTDAQKELVEGENADPDYFGRDTGDASKDDPRNQDDIGENEILVVSFGTSFNDSRVADIKGVEDAIAAANPDWSVRRAFTAQIIINHVQARDDEKIDNMDQALERAVKNGVKNLVVQPTHLMHGAEYDELSEAVEKYKDKFESVKIAEPLLGEVGSDATVVNEDKKAVAEILTEEAVEKAGYDSLDAAKEEGTAFVFMGHGTSHTAKISYSQMQSQMTDLGYENVFIGTVEGEPEDTSCESVIEKVSAAGYKNVILRPLMVVAGDHANNDMAGSDDDSWLSQFKASGKFDKIDTQINGLGEIEGIQKLYVEHTAAAMSKMRKILQKLLSKLFIVSTIIIIQMIWWFFLFYTASVASRVFQDLLYVAAILLSLYIVNRRMKMYIKMSWIFLILSVPIVGIPCYFFFGRPELTSKTQKRMARIVEAYAPLRPENELLNETLRLTDMDAYRQSRLITQNQKYPLYAEDCTEYFKSGEEAFESILKDLRSAEKFIFMEYFIIGSGVMLDQILDILKEKVKHGVVVRIIYDDFGSINAIPPHFIKEMESIGIQTRRFNPYKPMLSVIMNDRDHRKILVIDGRVAHTGGYNIADEYINKKIRFGYWKDAGIRVEGECVNSFTTMFLEMWNYINKDNAVHDEYLNPHNTFSQSEKSGFVQPFCDSPLEHDDVGENLYVSIISRAKKYVYIFTPYLILGTELSHAMISAARSGVDVRIVVPKIPDKKLIYLQTKANFRPLIEAGVRIYLYIPGFIHSKCIVADDDTAIVGTCNLDFRSMYWNFEDFVYMYRTQCIGKIKEDAIETFAVSEEVYEESTNDISFAGRLLQSILQLFAPLLMTYCENESYTKLKNRIIMKNAKYSINANLVYKNGYSGKNVNIAVLDTGVFKHKQLDGCIKHFMDFVGGKETCYDDNGHGTHVCGILSAADIGMAPGAGLYVFKVLDYLGMGQTSDSIRALKYIKENCVRLNIKILNFSVGYLPCSDTAERIKILKLIDELWDMGVVVVAAAGNYGPAPFSVTVPGISRKIITVGSFDDIRSGKGPTDCCIVKPEILAPGHDIISLGTRDGTYVRKTGTSMATPIVSGAIALLLEKNPNMRPEAVKLALYNTCDRAGDSHKGSWGIINVDKLVGILMYKSYSMELAGRTLTVDIGRVAAQANGAVFIKYGDTTVLSTATASDKPRDGVDFFPLSVEFEEKMYSVGKIPGGFNKREGKASENAILTDRVIDRPMRPLFPKDYRNDVTLNNLVMSVDPECRPEIVAMIGTALAVHISDIPFDGPCAMTQMGLVDGEFIVNPSQKQWDEGDLQLTVASTKEKVIMIEAGANEIPEDQMIEAIYKCHDINQTVIAFMDQIRDEIGKPKHEYESCAIPEQMFEDIKKIVTPEQMEEAVFTDEKQKREENIRAITEQLEEAFADNEEYLAVLGEAIYQYQKKTVRKMILKDHKRPDGRAINQIRPLAAEVDLIPRVHGSAMFTRGQTQICDVVTLAPLSEIQKIDGLDANITTKRYMHHYNFPAYSVGETKVSRGPGRREIGHGALAEKALVPVLPSIEEFPYTIRAVSETFESNGSTSMASTCASCMSLMAAGVPIKAMVAGISCGLVTGDTDDDFLVLTDIQGLEDFFGDMDFKVTGTHKGITAIQMDIKIHGLTRPIVEEAIARTREARLYIMDEVMSKAIAEPRKEVNEWAPKIEQITIDPSKIGDVVGQKGKTINEIIDRTGVKIDITDDGAVSVCGTDKEMIAKAIDMIKIITTDFEQGQILEGTVVSIKEFGAFIEFAPGKEGMVHISKIAKERINRVEDVLTLGDKVKVVCLGKDKMGRISFSMKDVKEDMIAKEKKQAIIAEYGRTPNDTGSPEVQIAILSARIAELTEHFKQNPKDHHSRRGMLKMIGQRRGLLAYLKEIDIERYRSLIERLGLRKMKNKLKLGQAAGVVAFAIIIGAVSMSSSSTVDARTTKAEANKNRSVNAGVALNLTDVADATELLTAGVTSALTYYGADVSVAQNDSNVVTASAQGAQAGDTAQETEQANEASQTPTAAQTCGYTNLGMSVISSGNLNIRQEASTDSEVVGILTNHNACELLEDAGDWYKVTSGKVTGYVSKQYLVIGDEAEAIAEQEIKTVATVNTETLNVRAEKSTEAAVLSQVGNSEAFTVNSVADGWVEISVDDSVGYISQDYVTLAQALPTAKTIEQVKYGDGVSDVRTSVVSYALQFVGNRYVWGGTSLENGVDCSGFTMRILGKYGISLPHSSKAQPSYGTKISASEAKPGDLFFYGSGRSISHVAIYIGNGQIVHASNKRDGIKVSNAYYRNPICVTRYLPDMEYISKTLDFHVKEPSVISFGKFDGLHRGHEFLMEKQIEQSNLHGYKRIIFTFDIPPKSEVLGVESKVIITNDEKEYVFEKSGIDYLIECPFVPQVMTMEADAFVRWIVKSLNVKCIIVGDDFRFGHNRAGDHRLLSAMAGELGYELIVVDKIKDGDRDISSTYIREEIAAGHIKKANELLGYPFFIKGRVVHGRALGRTIGIPTVNLSVPHDKLLPPKGVYMSRVLVRDNWYLGVTNIGCKPTIEGKNPIGAETYIIDFGQDVYGQDIMVELHKFVRPEMKFDSIEALKSQMSADINFTINYAGSHTFMVNGIINVYKEKGYTSFDVVAKLRGIFHQKKIGHTGTLDPDAQGVLPVCLGKATRVCDLLTDKDKVYKAVLLLGQETDTQDITGQVLNQAKVNVTEQAVYDVISQFVGRQKQVPPMYSALKVNGKKLYELAREGKVIERKARDIEVFDIKVESIDLPEITMTVHCSKGTYIRTLCNDIGERLGCHGCMKSLLRVRVAGFDLEHALTLSQIQSKVDEGCFDMVMPVDGVFENLPAVHAASDADKLVRNGNKIPAVLTDYLKNSADSDIRYRVYNHEGIFVGVYSYLDETGEFKPVKIFMEMTEIDSILKDAQSVAVSGHVRPDGDCVGSTLAVYNYIKDYYPDIKARLYLEPSPNIFKFMQRADEIDSSYADDTVYDLFIACDCSDTGRLGSAAKYFESAKRTLCIDHHVTNGAFADANYIFPDASSTCELVFELLPKERITIQIAECIYTGMVHDTGVFQYSCTSKKTMDIAGSLMEMGIDYSRIIDDTFYTKTFAQNKIMGQALLNAALYLNGDVILSAVSRAEMEKYNVLPKHLDGIVNQLRVTKDIKVAVFLYENEDGTYKGSLRVNGDYDVAKVASVFDGGGHVKAAGFTIDGPLEVATDRILTAIKDNIMRKNSIKNIRINEEVMRELSNIIRGEIKDPRINPMTSVVAVEVAPDLKTAKAYISVLGDKKSQADTLAGLKSAEGYIRRTLAKNINLRNTPAITFIIDQSIEYGVEMSKKIDEVTKNLKEDMAKMRVHELAKELNIKSQDVIDTLNGTQFAVKNVQSGLEEEAQQIVRKKYAKTEVKKDAPKKEETKKDEAKAADRPKKKASITAVFNAQYSKQGRKTNGGNGSGNNGNNSSQRRNGNGRRDNQSSRPEQHSIIKPRPVGERAMRPISERTADPYADMKVTNSRPARQADADRRSDRRQDNGDRINNRNTDRNADRSRNTDRNSDRRTNNRDNNNRDNSRDNNRDNNRGFRNDSRRPAEGDRNNDRSRSNDRSRSNDRSRSNDRNNDRTGSRGDDRNRFRKETVAVAAPDDVRGKESRDRGNDRKNKHNHNQSQKQDKLGKKQENYINLEKHGGKKKPQQPKAQPKEDENEIKTISLPEKITIRDLADKMKVQPSAIVKKLFMKGEMVTVNSEVDFAAAEEIALEFNFICEEEEKVDVIAELLKEDEEDESKMVPRPPVVCVMGHVDHGKTSLLDAIRQTRVTDREAGGITQHIGASVVSINGQNITFLDTPGHEAFTAMRMRGANSTDIAILVVAADDGVMPQTVEAINHAKAAGVEIIVAVNKIDKPSANIDKVKQELSEYELIPEDWGGSTIFCPVSAHTKEGIDNLLEMILLTAEVLELKANPDRNARGLVIEAQLDKGRGAVATVLVQKGTLHVGDPIACGSSYGKVRAMIDDKGRRVKEAKPSTPVEILGLNSVPSAGETFVACDSEKEAKAFSDTYISEEKNKLIEDTKAKMSLDDLFSQIQSGNMKELDIIVKADVQGSVEAVKQSLVKLSNEEVVVKVIHGGVGAINESDVILASASNAIIIGFNVRPDPVAKATADREGVDIRLYKVIYNAIEDVSAAMKGMLDPVFEEKVIGHAEIRQIFKASGVGNIAGSYVLDGFMERGCRVRISREGEQIFEGDLASLKRFKDDVKEVKTGYECGLVFDGFNDIQELDIVEAYKMVEVPRMTDRVLSMLGLAAKSGNVVSGEFSTEKAVKTGKAFLVIVADDSSDNTKKHFSDMTAFYEVPIYFYSDKVGLGNAIGKEFRASLAVTDENLANAVIKKLQPNKTEMANKKIPMRKCVGCQEMKEKKSLIRVVKTAEGDIILDDTGKKNGRGAYICKSLECFKKAKKTKALERSLGVSVSEQVYEELEKEMNQIDRMSNELLEALNILEQEKNISKETLLEAIENSLVTACKNHFGKSDNVKVEIDPETCAFSCYQEKTVVDTVEDPVEEISLADAHKVNGNYQLGDIVRVEVKSKEFGRIATQNAKNVILQKIREEERKVIFDEYNSKEKDVVTGVVQRYIGKNVSINLGKADALLTESEQIKGEVFKPTERIKVYILEVKSTSKGPKILVSRTHPELVKRLFESEVTEVKEGIVEIKAISREAGSRTKIAVWSNDPNVDPVGACVGMNGARVNAIVNELRGEKIDIITWDENPAILIQNALSPAKVISVIADADEKSAKVVVPDYQLSLAIGKEGQNARLAARLTGFKIDIKSETQARESGDFMDYENDYEEDDYDDDYDYSDDELAENERLADTEQADVQTEALDTEADENEAAGTENDAADSGDEQMSKASVYEAKTENFIQPILDSMNFELVDVEYVKEGGMNYLRAYIDKEGGITVDDCEVVARQMNEILDREDYIPDSYTFEVSSPGLGRPLKKEKDYVRNMNKEIEIRTYRAINKSKEFYGLLKAYDKDTVTITDEDGNETTFNKSDIALIRQALDFMRYNKFNKNEKEIFIMAILVTGGAGYIGSHTCVELLDAGYDVVVLDNLSNSSEKSLDRVKALTGKEVKFYKGDILDRDILNKIFKEEKIDSCIHFAGLKAVGESVAKPWEYYNNNIAGTLTLVDVMRQNGCKSIIFSSSATVYGDPAQIPITEECPKGQCTNPYGWTKSMLEQILMDIYKADNEWNVILLRYFNPIGAHKSGTMGENPNGIPNNLMPYITQVAVGKLKELGVFGDDYDTPDGTGVRDYIHVVDLAVGHVKALKKIEENAGLCIYNLGTGHGYSVLDIVKNFEAATGVKIPYTIKPRRPGDIATCYCDPSKAKRELGWEAQYGIKEMCADSWRWQKNNPNGYDDMNNKYKNSYIVKEKELVSLSVYNVGFQSCDSLYQWGPGIRDHYLIHYIISGKGRYTVNGSVHTLTPGDAFLVYPNTEVIYQADAEDPWEYTWVGFTGSDAATILRATDFTKAHPYIHSVSNGNEIKRQLMHIYDARGTEFENALEMTGRLYTTLALFVSAATSKPPQNSANSYVQKGIEYISANYSYPITVEDIASYIGLSRSHLFRSFQSILGVSPKEYLTDFRIKQACYLLKHSSLSITAIAGSIGFDNSLYFSKTFHKIKGLSPKEYRSKYKKAQEMARVKGGLGAKKRHNRTLKLAKGYRGARSKQYRVAKQSVMRALTSSYAGRKERKRQFRQLWIARINAAARLNGLSYSQFMHGLKLANVDLNRKVLADMAVTDAAGFAKLVEVAKSKLAMPKMKTSRAAAKRFKVTGTGKLKRNKAYKRHILTKKTTKTKRNLRKATMTDETNVKNMKKILPYMMINEQIRDREVRLIGADGEQLGIVSSREAQKIADEAGLDLVKIAPNAKPPVCKVIDYGKYRYEQARKEKDAKKKQKTVELKEIRLSPNIEANDLNTKMNAAKKFLAKGNKVKITLRFRGREMAHMNASKHILDDIAENLSDVAVVEKAPKVEGRSIGMVLAEKRMEDLMKLRESIDEIDSEIVRLYKERMDISKHVAEYKITTGKKVFDKTREDEKLEKLSSLADDEFLKHGIVELFEQIMSTSRKKQYQLMTEHGIVEKENFTEVDSLDFSNARIVFQGVEGAYSQLAMKTYFGENCNGYNVDSWKDAMEDIKCGKADYAVLPIENSSAGIVSENYDLLVEYDNYIVGEQIIRIDHSLMGLPGAKISDIRTVYSHPQALMQCSDFFDEHKDINQVAVRNTAFSAKKVKDDGDITQAGIASHISADIYGLQVLESRIQNNKNNATRFIIVSAKRVCRRDADRISICFETPHKSGALYHMLAHFIYNGINMLNIQSRPISDKAWEYRFFVDFEGRFTDTAVQNALRGIREEAIALKILGTYMRCANCGNELKAGSLYCDVCGHPVQIVPDYNEFDDYLDNLVGNDDRRTDGQKTVKPVSDRTIRFDEPVREQLHSAGQRNGQKPDRMSQYENKQAQTGKQQSQTKQPCDEKPQSDGQRAKRAQQKKIIIISAVVCVVAIVILIAAITRNVSRSHDNSFDYQVKQAKAAYSAGNINSAVSYYEKALSIDSDNTDVRFALADIYMSKKDYDAALVLYQEIINIDSKSKEAYKKLISIYESKKDYDAIVALRESAKDASVLKLFADYTVSKPQFSKSSGKYGETIELSIDADSDTKIYYSYDSDDPLTRGERYYSPITLDKEGTYEITAVAVDDRGIKSEVASAKYEIEFEAPDAPEIDPDGGTFGAQTDITITVPENCKVYYTWDSSDPSAASTEYTAPIPVPEGNNVLSVIAIDQNTGKCSDIYRSRFEFYMNMTNLIDGKLISTQIKEELKEEVAELKKKGIEGCLAVIQVGNDPASSVYVRNKKRACEYVGIKSLSYELAEETTEDEILKLIEKLNADASVNGILCQLPLPKHIDEDKVIDAIDPKKDVDGFSPQSVGAMVIGKPGFLPCTPAGIIQLLKRSNIDIDGKSCVVVGRSNIVGKPMSLLMLRENATVTVCHSHTKDLKDVCKNADILIVAIGKPKFIDASYVKDGAVVIDVGIHRNAENKLCGDVDFDSVVSKASHITPVPGGVGPMTIAMLMSNCVEAMKRMKTDIQIAQEATMLPIKDVAASIGIEEDDLELYGKYKAKISDELINRTKKNPDGKLILVTAINPTPAGEGKTTTSVGLGEAFGRLGKKALIALREPSLGPCFGIKGGAAGGGYAQVVPMEDLNLHFTGDFHAITSANNLLAALLDNHIQQGNELGIDPRQIVWKRCMDMNDRVLRNIVVGLGSKMDGMVREDHFVITVASEIMAILCLADDMADLKKRLGRIIVAYTFDGKPVTADDLQATGSMAALLKDALKPNLIQTLEHTPAIVHGGPFANIAHGCNSVRATKTALKLADYVITEAGFGADLGAEKFFDIKCRMAGLKPDAVVLVATIRALKYNGGVQKDELSSENLDALKAGIVNLEKHIENLHKFGVPVVVTLNSFVTDTKAETDFVEQFCKERGCEFALSEVWEKGGEGGIDLANKVLETIEHKESNFKVLYDDSLSLKEKIETVAKEIYGADGVTYSPAAERELKRITDLGMGDFPVCMAKTQYSLSDDAKKLGRPSGFKINVREVYASAGAGFVVAVNGSIMTMPGLSKKPAAYGIDVDDNGVITGLFMATRKKSSAKRQTKKERMAQIERQQAFKKEIFLWIVVAVSILLFISNFGIGGHLGNAVSGFLFGIFGMVAYIFPLVLLVGSFFAVSNKGNSYAIMKLVMTIVFIWFICVFMYLAVYGEFAVSPVQSYIDSVERHSGGGFVGALIGCILVPAVGIIGAYVVTIVVMIICLVLITGKSFMKGMRNGGRKVYESARENNERYQEYRQYKSRERQTREGLASDNTDSDIKETAKGGRRSKRAGRRMDNKITGVSLDTKIDGSENALDSGMTGSDTAHVGIFGQGAAATDALGEITIENYPSSPAIKEKKTTSLTSGDAGEIVQTPDFGVASEPVSVLGGTAASHVSQIPISGCVEPDISDDFDIQKDNELQSKLSAPAADAVMTKPPAAEPGKKKVKSDKDELAKEVEKVSEQIAINDAENAIQQKPYVFPAVDLLKAPDRGKTGDSQAHLRETAAKLEQTLNVFGVNAKVNNISCGPAVTRFEITPELGVKVSKIVNLADDIKLNLAAADIRIEAPIPGKAAVGIEVPNSQSVAVSFRELVESEEFKNAKSKITFAVGKDIAGKVKVTDIAKMPHLLIAGATGSGKSVCINTIIMSILYKAKPDEVKLIMIDPKVVELSVYNGIPHLMIPVVTDPKKAAGALNWAVSEMTDRYEKFANSGVREINGYNAMIDAMDGKDTEKPPKMPQIVIIVDELADLMMVASKDVEEAICRLAQLARAAGIHLIIATQRPSVNVITGLIKANMPSRIAFAVTSGVDSRTILDMNGAEKLLGKGDMLFDPQGVPKPLRVQGAFVSDKEVSDIVKFIIENNENAQYSNDVAQKMESLSNDTTNTTVTISDVENTDDGRDSYFAEAASIITDKERASIGMLQRYLKIGFNRAARIMDQLEEAGVVGPEEGTKPRKVLVTKEELDTILENNMKKILFVASECVPFIKTGGLADVCGALPKEFDKNYWDVRVVIPDYSCIPEQYRNNFEYVTHFYMSSGPYVQDKYVGVLKYEQDGVTYYFIDNQEFFTGFSPYTSDTKFEIEKYTFFDKAVLSMLPLIDFKPDIIHCHDWQTGFLPVYLKNEFAANPFFWGIKTIITIHNLKFQGIWDKEWVQGVSGLTDNLFTPDKLEFKKDANMLKGGLVYADYITTVSDTYANEIQTEYYGEGLNGLLSARHFDMQGIVNGIDYNVYDPQTDGKIYCNYNASDFRKKKFNNKTKLQQELGLAVDKKKYMIGLISRLTDQKGLDLINHVIEGIVDDFTQLVVIGTGDPQYENMFRHYAWKYPDRVSANICYSDDLAHKLYAAADAFLMPSRFEPCGLTQLISFRYGTVPIVRETGGLKDTVKPYNEYENSGDGFSFSNYNADEMLAVINYSKHIFFDKKREWNQIVDRGMANDFSWNASKFKYEGLYNYLIGEMSGHSKFANIKHKKEKNDAAKGKIFTMIGRELAVAVKEGGPDPANNFKLAQVVAKAKANNMPNDTIERGIKKAAGDGNSVNYETATYEGYGPSGTAIIVKCLTDNKNRTAANVRNAFTKGQGSIGTQGCVSYMFDEKGQIIIDKEECDMDADDLMMQALDAGAEDFADEEDSYEITTAPADFDAVRAALEEAGITMASAEVTMIPQTYVTLTDEADITNIGRILDLLDDDDDVQEVYHNWEEMLYAIIILSILVVILLLCIGVLLYGMKNNKKTLDGILGNDDVTEEEIISMVREGHEQGTILASEAELIHNVFEFDDKEVKDIMTHRKNIVSLDGSMSFIDAIEFIIDTGKSRFPVYENDVDSIIGVLHIKDAFTFFEKNEVYRSSIKDIDGLIRPVDFIPETVNINDLFKKMQSKKSHLAMVVDEYGQISGLIAMEDILEELVGNIEDEHDEEENYIRKNDDETFIMDGMTEFSDVKEALSLPVDDDAYETLNGFIISLSDKIPEEGDKTVISAYGYRFSVMSVEDKVIKQVMIKKLAPEEKKMIIQRGDIYYADLRPVVGSEQGGIRPVLIIQNDVGNRHSPTVICAAITSQMHKAKLPTHVELACKEYALAKDSVVLLEQLRTIDKKRLKDKVCHLDEDTLLKIDRALEISLELITMAINRIRADIDLDAILYNMESMHNKLKPGTMMAAVVKADGYGHGAEAVSEVLEPLPYLWGYAVATSNEAMQLIAAGRKKPILILGLSFPEQFEEIVDNDVRPAVCTYETAKELSKIAAAKNKTCKIHIKIDTGMCRIGFQVTEESADIIAQIAKLPNIMIEGIFTHFARADELSKEPAFEQFDLFKRMIALVEARGVEIPIKHCSNSAGIVEIPECNMDMVRAGITLYGLWPSEEVDKSKISLKPVMSLHSRVAYVKELEPGRHISYGGTFTVEHPMMIATVPVGYGDGYSRGLSNKGWVLIKGKKAPICGRVCMDQFMVDVTDIPDVKIGDAVTLLGKEGDETITMEQLGELSGRFNYEFACLITPRVPRIYHKNMILEYIVTGNEMKLLDDTTSQVFLVPSVVLMEQAAAGVVRELVACFDKSKEFAVICGRGNNAGDGIAIARLLNQAGYRCMVYYAFGTDEAGSELFELQKNIYARYGFKVVSDIECVCKSDVIIDALFGTGLKRAIEGSLADVISAVNKANAYRVAVDVPSGVDSDKGHVMGCTFKADFTYTFSYKKTGLLLWPGCDYCGLVKVVPIGIDDHSFCGNLPSVRALDESDLKKLDNRPAHSNKGTFGKLLVIAGSRNMAGAAVLSAKAAYKSGAGLVKIITPECNRSIIQCALPEALLCTDIASAKALETELDWADAVVIGPGLSKSDNAKMLVETVLKTAEIPLVIDADALNIISDNMTLLIEHKMPVIVTPHLGEMSRLMKKSIANIQEDIIGVAGEFASLYNVTCVLKDFRTIIAAADGERFINLSGNCGMATAGSGDVLSGIVGGLLVQWRDTKKAAAYGTFIHGLAGDMVFDNTGSYGMIASDIIDGLDKVWIKVEKNGNMIKKVPLLVLDLFDIEYDDPMVFNANNANADNANNENKGNMSKEISQAVIRRLPRYYRYLGELLDEGVERISSNDLSHRMKVTASQIRQDLNNFGGFGQQGYGYNVQFLYEEIGKIMGLNTEHRIIIIGAGNLGQALANYVKFEKLGFVITALFDINPELSGKSVRGIPILMLSELDEYCRTHRVDIAALTMPKSKADSIASKLVDLGIRAIWNFAHVDLEIPNKDVVVESVHLSDSLMQLSYNIVKNSKNKMSKITMTTPLVEMDGDEMTRILWQMIKDELLIPFIDLKTEYYDLGLEERNRTDDQVTVESAKATMKYGVAVKCATITPNAARMTEYNLKEMWKSPNGTIRAMLDGTVFRAPIVVKGIEPNVKTWVKPITIARHAYGDVYKATEMKVAGPGKAELVFTAEDGTETRELIHEFKGAGVIQGQHNLDDSIESFAHSCFKYALDTKQDLWFATKDTISKKYDHTFKDIFQEIFDAQYKDAFEKAGITYFYTLIDDAVARVMKSEGGFIWACKNYDGDVMSDMISSAFGSLAMMTSVLVSPHGYYEYEAAHGTVQRHYYKHLKGEETSTNSVATIFAWTGALRKRGELDKLPALSEFADKLEAACIKTIESGKMTKDLALITTIENPTVLNSEGFIKAIREELEKTIMSHDNYSLSARVYNHIRDGILAGTFAKGDELKEKNIGDELGVSRTPVREALRQLELEGLVSIIPNKGAFVEGVSTDDIRDIYEIRALLEGLCARWAATRISDELMAAMEENIYLTEFHEKKGNAKKLLELDNRFHELLYEAGGSKELMRVLKDYHEYVGRVRKVTLGETKRAKNSTHEHKQICEAIKNHDALLAEKCAREHINNSKENMEHLGWENLIKMREVLMNEKTNLLQLEEHFYQLVDVDEPNTFRNLFPYSEVPKIAFNDRIVPHNMPEDIWITDTTFRDGQQSRAPYTTEQIVTIYDYLHKLGGPKGIIRQSEFFLYSKKDRDAVYKCLERGYKFPEVTSWIRASKKDFELVKDIGLKETGILVSCSDYHIFYKMKMTRREVMNMYLSVIRECLETGISPRCHLEDITRSDIYGFVIPFCVELMKLQEEYKIPIKVRACDTMGYGVNFPGAVIPRSVPGIIYGLNTHAGVPSSQIEWHGHNDFYKAVNNSTTAWLYGASGVNCSLFGIGERTGNTPLEAMVFEYAQLKGTLDGMDTTVITELSEYFEKELGYVQPSRTPFVGKNFNVTRAGIHADGLLKNEEIYNIFDTGKFLNRPPLVAVSNTSGLAGIALWINTYYRLPDDRKVDKNSKLVNMIKQWVDEQYDEGRVTTITDNELVVQITDCCKKLNIVLMSDLAATNCSCSNTDNGCGCSSILWIILLLCCCCGNGNGGSFFGGNDCGSGNNSCIWAIILLFCCGGFGCGSSNNGCGCGCGCMSPDSHYACLQHILLKKDYMLIIDGHDVYEIDEECIKKHRVKGECKVLEKLKEKEQRRQKKNTEKSMDENSLFTPFDEITQTRELQMLKTIIPYMPHDSQKQMTLMVHYISLMNSMRMIDCAPALSVAETESMSDRRLSMLNALKKYCSKSEQDTIDNLLNIFSVLDNREIYDKAGIFKMTKQEFLNNFAQKEKPKDTTSAMPFLMESIKEAKRNGIEFTKEEVYSMCTELSKNLPEKNRRQVERLLKMLMLKLKSRIALIILLTLIFTNTHVFASEIKEAEAASFASGPSLNTLVDNMSESDGVSYIYYNLGGAANNINNYGYITPKQKFMGLREPHKYGYKFDGWYLDEHFSKKADVLTYEKANGYVVYAKWVRTINNEYSVEHYNYRSNKKAHTLALNDCDYDFIDEIDIPGMPETKENDFLNNYIFSEAQCPQGICITDEYVLITSYSDDKGSLGELMVFDREDGEYLVTLGMDANSHLGGIAFDGENVWVCNSYDTTVERISYDFLSLMATANSKQVIDATGVVDVFDVGNKPSCITYYGGRLWIATHNILFRSKMVAYYYDKKDDRLTSLSTYTIPARVQGVTFDASGKVYLSTSYGRNESSYIKCYKSLIALSSRPNRPDITIEMPPGSEELDSVDKRLYVIFESAGEKYLEGTDGKGNSPAPIDKILRINTDSFKNMNVYTTEKIRNVVLLGHSGCGKTSLVEAMAYLAGQTTRMGTVADGSTISDFDKEEIKRQFSIHTSVVPIEWDNVKINILDTPGFFDFVGEVEEAVSAADAAIIVVSGKAGIQTGTKRAWEICEKYKLPRMIFVTDMDIDNASFKDVVLKLQELYGKKIAPFHLPIRENEKFVGYVNVIQQRAKRWNESGGVDKFDVPEYSKENLGICREALVEAVAETSEEFMDRYFGGEEFSDDEIRAALRANVLEGSIVPVLMGSNILARGMYTLMADIVKYLPSPEKRSCTGINTKTNEVYNADYDFAKSKSAYVFKSIVDPYIGKYSLIKVNSGVLKTDDVLYNYHRDCDEKIGKLYVMRGSKVEEVKELHAGDIGALAKLTKTLTTDSLSTRNMPVTYLRTSISKPYVAMRYKAKKKGDEDKISQSLQKLLMEDLTLNSVNDSENGQTVLYGIGDMQLDVVASELLEKYKVEIELMRPKVAFKETIRKKSDVEYKYKKQSGGHGQYGHVKMTFEPSGDMDTPYVFEQTVVGGAVPKNFFPAVEKGIAESVKKGPLAAYPVTGIKAVLYDGSYHPVDSSEMAFKVATQQAFKKGIMEAKPVLLEPIATLKVVVPEGYTGDVMGELNKRRARVMGMNPTDNGYQEIVADIPYLELYGYNATLRSMTSGSGTFSYEFARYEQAPDDVAAKQIEERASKLVEVEEMHFDKVGFIGLGLIGGSIARKMKENNPKVSIIATAGHQQTIEDAFGLGLIYNNELLELNSFKDCDVIFLCAPVNKNIEYLTQLKDIIKDDCIITDVGSTKTQIHEKVIELGLERNFIGGHPMTGSEKTGILNSDKQLLENAYYIITPTAATTEENQNDFKQFVLSLGSIALILDYREHDHATAAISHLPHMIAYSLVNLIEHIDSEKETMKTIAAGGFRDVTRIAASSPVMWENICESNKNQLLSLMDQYEANFHKLREIIAEGSSQKMIDYFQDSKNYRDSLTLPGAKIRKDFHEVFVDIADEAGGIAMLASLLAFNGISIKNIGIINNREFEEGVLRIEFYDEDALESAISVLKERNYTIHRRMIYKVKKVNHPHDIVTSVPGSKSITNRALLIAALASGRSVLKGCLFSDDSRHFIDALIRLGFPVLVDEDKREITITGFGGRIPKNEAEIDVGSAGTAARFLTALLGLSKGRYHIVSSEQMKKRPMKDLLVSLEKLGAHIEYDENEYHFPFTIGNTGEYADTVDINVDKSSQFLSALLISAMVMEKTFTINVTGTHGMAYVEMTRLMMKQFGLDVMQDKKNNSFIIPKKAAYESLEYDIEPDVSAACYFYAMSPLLHVKSKVMGVHQNSLQGDVAFLDVLADMGCTISDEADGIVCMPPKNAHIHGGSWDLSTFSDQALTLAAIAPFAKEPVGIEGISHIRLQECDRINAIEENLAELGVRVEETENGLRIYPAECIKPCKIKTYDDHRVAMSFTLPGLKAEGVEIIDPYCCRKTFEDFYEVLEESVYMLIESIPLDIHTYYDTRIQIWTKEVVDAVIEIVRRTDSEEGVYHYGAVFIGMTDTDALKIDIYQIFNDLMDVKDFDYDLPEELIAQDPLEDRSSSRLMVLDKKTGEVSHHVFKEIVKYLRPGDCLVLNNTKVIPARLFGVKEGTMAKIEILLLKRRQNDVWETLVKPGKKAKQGTRIIFGDGLLTGEVIDVVDDGNRLIQFSYEGIFEEILDKLGQMPLPPYITHQLKDKNRYQTVYAKYDGSAAAPTAGLHFTKELLQQVKDKGVDIAEVTLHVGLGTFRPVKVDNVLDHHMHSEFYMVSQEAADKINNAKKNGGRIISVGTTSTRTLEAASDENGMLKECSGWTDIFIYPGYSFKVIDCLITNFHLPQSTLVMLVSALAGREHVLNAYKEAVEERYRFFSFGDAMFITNDMHMDDEAAEMLTPLSWLKDYVDIDVTPKELEEKLFSCGFEVEESYEVGKDISNVVVGLVEKCEPIPETHLSLCQVNAGVHGTFQICCGADNVKAGGKYPLALIGATVYATAKDHVTIEGVMEIKQGKLRGYDSYGMLCSGVELGLNEDLYPGAGYNGLLVLPEDAKVGDDVKPILGLDDWIFDIAITANRPDCQCIYGMAREVAAVLGKELKEPALDYTADDVKKENFKVSVLAQDICPRYTAHYVHDVKISESPAWMRKRLALVGIGSISNVVDITNFILKELGQPMHAFDYSYLEGEEIVVRRANDGEKIVTLDEKEFELNSNNLVICDGKKAVALAGIMGGLNSEINDGTTEVMFESAKFARDNIRKSSRALGQASDSSALYSKGVNEYTTAMAMKRALHLMEELGCGKVSSTHVEVTTGNSLEPKEMKVSIAKVNGVLGIEVPTEDIVRILTNLGFAPVVSGDELTLMIPAYREDMEDYPDVAEEVIRMYGYDHVIPAFMPTAQVTLGGLNLRQQTERKIKEVLCAAGAYEGIHYSFFSPADLDLLRFPEDAPERHAIRLINPINVDLSLMRTTLASEMLYAMARNQKKGILEGRIFELGNIFIAKELPLTEYPDERETLCAGVFGENESFFTIKGLAETVADALDVKFTYKPAQKPFLHPYQTAEVFCDGQKIGYLGQVRYEICDELDMRVPAYVMELDLRVLSQWYGKDRVFTPISKFDDEKRDFAFVVDKDITCEQIENGIREACDYVSDVTLFDVYEGVQLPPNKKSMAYSVVFTPKDEELKTKKVEGFVKDILAHLKETAGITLRGMRDKIQQIREKALAEIDKADGLEKLNDVRAAILGKKGELTAVLKGMKDVAPEDRPKVGQWVNETREAVEKLLDEKVKKFEAEALKRKYESEKIDVTMPAKRSKKGNLHPVTQVKNQLSEIFTSMGFEVYEGTEIENDYYNFTALNTPKDHPARDMQDTFYLSPEFLLRTQTSAGQIHVMEAKKPPIKVVSPGKVFRSDDDATHSPMFTQMEGLVVDKGITLCDLKGMLDQLVKKMFGKNVTTRLRPSYFPFTEPSVEVDVSCFQCHGKGCSLCKGTGWIEVLGAGVVNKKVLEGCGIDTNEYSGFAFGIGLERIAMLKYGINNIKLLFESDLRVLDQIDDNMMNLPIEFEKKMKAFLGNEWDDFLYSYDNNRFQALRFNTLKVQSPEERMRILKVLGISSDKRVSWADEAYYFDENVRPGKHPYHEMGLYYIQEPSAMSAAALLAPKPGMRVLDLCAAPGGKSTQLATYLGDRGLLVSNEINTQRSRILSQNIERMGIKNAIVTNEDSFVLASHFPGFFNAIQVDAPCSGEGMFRKLPEAIEQWSMENVAICATRQKEILDNAAVMLKPGGVIVYSTCTFSKEENEDVIEYFLERHPDFTLEEMERFWPHKVDGEGHFVAKLVRRGSVNELGADYDLCEDSCNKVEDTGLKADRKTKKNKNSKNRKNETKPALTKENMKLLTEFLDETISEDMAAWIKNSRLVMFGEQLYRLPDMEVDIKGLKVQRAGLHIGEFKKQRFEPSHSLALALKLSEAKNVVKLTWDDPQTIGFFNGQSVMLSDEQAAECKKGWALVCVDGYTAGWGKVNGTQVKNHYPKGLRNKIMANRRRRRQKPNQMVWIMLAITMVCVVIVFAIVMVQKEKGTLVKQARAVTKDMVYENAYIVSNDDGRLIFICDGDLYRAKGTMEENFTGVCDIEISGSKVKKIQIKPDDISGVMLSYGDGTMQIAGQGDIPMQSDKLPVYDETGTSPKEIAVSDLIIGSETLSYILDSGRICAIVRRQVPDLTYIRVLIKNDGKDAFPTIAAAAAANLYVDDADCGSNAIDDVGAYMANAQKSRIKVSSVDNYVSINGKNYPGSFEFIGTEEGIVAVNTVDVETYVRYVLPSEMPSTFDAEALKAQAVCARTFVYSQMKNTQYALYGANIDNTTAFQVYNASETKQSTDEAVKATAGQVVSCGRSLITCYYFSTSAGKTEDMEVWSSSTPDFIHKVESVDDNSPYYRWTSELDLSAYNDPQYGTATGISVDKTSDAGYVLSLTINYGNKSQTITAENDIRKALGHYQKKVTLNDGSVRENMSMIPSACFSVSAGANGHYTLSGGGFGHGIGFSQYGADKLAKAGSSYKDIIGYYYKDVTVVDISSVCSEQMNYFIIIDAVTLILGIYIIFVSLRMKKSGKIESTFVAEDEMKKIKDTAGYIAYIYPKSLVFGIVILVISIVAIVSDCLKKIPYWSYVEMIIFVAVIIWFSNMLRNAREKFVKFMDLLYSSTRNSEKKITASQAILKGLADDGGLFVPESIPALDVSIEELSKMSYQQVAYEVMKLFLTDFTEEELKNCINRAYDSKFDTTEIAPLKFADGAYYLELFHGSTIAFKDMALSILPHLLITSAKKNNVKNEIVILTATSGDTGKAAMAGFADVEGTQIIVFYPKNGVSPIQEKQMLTQKGANTHVVGIHGNFDQAQSAVKAMFNDKALAETMDAAGYQFSSANSINIGRLVPQIVYYVYAYSKLFAQGAVAKDEKINIVVPTGNFGNILAAFYAKNMGLPVAKLICASNENKVLYDFFTTGEYDKNREFILTNSPSMDILISSNLERLIYRIAGNDANKNAQLMASLAKDGKYTVTPEMKEKLSDFYGNYTSEKETAEVIKKLYEDTGYIIDTHTAVAAGVYDKYKEATGDTATKTVIASTASPFKFTRSVMDAIDPKYDSMTDFELVDELSKLGKVKVPNAIEEIRDAKILHNTVCDVDQMENTVKKMLGVQMKAAHGRVFKYGDNVDTDVIIPARYLNSSDPKELATHCMEDIDKDFVNNVKAGDIMVANKNFGCGSSREHAPIAIKAAGVSCVIAETFARIFYRNAINIGLPIIECPEAAKAINAGDEVTVDFDSGIITDETTGEKFKGQAFPPFMQKIIDCEGLVNYINQKMGMTMTQKILAAHAGLDSVSAGQLIEADLDLVLGNDITSPVAIHEIDKMKVEGVFNKDKIALVMDHFAPNKDIKSAEHCKCVREFACKNEITNYFDVGKMGIEHALLPEQGLTVAGDVIIGADSHTCTYGALGAFSTGVGSTDMAAGMATGKAWFKVPSAIKFNIVGKPAEWISGKDVILHIIGMIGVDGALYKSMEFVGDGLKYLSMDDRFTIANMAIEAGGKNGIFPVDDLTREYMKEHSKRPFTEYEADSDAEYDEEYTIDLSTLKSTVSFPHLPDNTRTIDEVGDVKIDQVVIGSCTNGRMDDLRIAAKILEGKKVADGIRVIVIPATQKIYLQAMEEGLLKTFIEAGAIVSTPTCGPCLGGYMGVLAEGERCVSTTNRNFVGRMGHVDSEVYLASPAVAAASAITGKISGPKDVMMNQNLSSYWIFYTVANAGNISKAAKELYISQPAISKSIQKLEDGLECKLFSRSSRGVVLTDEGRLLYDHVSEAFEALNEGEEKLKRSIELGVGQLKIGVSSTLCKYMLLPYLKEFIHRNPHISISIECQSTNETLKLLDDDKIDIGLIGKPASLKTFNFYYLDNIEDIFVTTKDYLRNLSARGVKKSEILQNSTLMLLDKGNMTRKYIDDYLQENQIHVKDSIDISNMDLLIDFAKIGVGVACVIKSIVSKELADGTLIEIPLGIPIHKREVGFAYKESSKLSTSLQTFIKFYESYTPEDFMKEQIHTIPISDAFDNAGECPFCYIEKRTEDHVMDFVLGHGASYMEADIRDMTDKEGFCRAHFKKMFDYGNSLGNAWILKTMYMRHIEEMDKEFKNFKPDSVQRSGLFKKANASSNSIVDWINKRESTCFICDSVNKTFNAYMKTFFTMYEKDPELKEKLKNTKGFCLDHLKVVLEGADTYLKGDKRKEFYDIVLPLMHDNMNRIYEDVAWFIEKYDYKNKDADWKDSKDAIQRGMQKLRGSDPSLPPHVLKKMSEPYNHKAIEKKWQEYWKEHETFKTDVWDFSKPKYYALDMFPYPSGVGLHAGHPEGYTATDIMSRMKRMQGYNVLHPMGYDSFGLPAEQYAVNTGHHPNGFTQKNIETFSKQLRELGFDYDWSKMISTSDPEFYKWTQWIFKKLYEAGYAKHIDMPVNWCEELGTVLSNDEVIDGKSERGGYPVVRKNMKQWVIDQPAFAEKLLEGLDEIDWPESTKEMQRNWIGKSTGVEVKFQIVGGGEFSIFTTCIETIYGITFMVLAPDGDIVKGLMDRVENKEEVQAYIDETVKKSDMDRTELNKTKSGCELKGLHCINPVNGKEVRMFIGDFVLASYGTGAVMAVPTHDQRDFEYAQAHDIEMIQVIDGADVSEHAFEKHDYLGKGCKLINSEEFTGMVVEDAKEAITAKLEKMGVAKRTVNYKFREWIFARQRYWGEPVPCVYKEDGSIYFLPDDELPLVLPELEDYKGKNGKAPLENATEWKQYDRNGVKGTRETSTMPGSAGSSWYYMRYIDPHNDKEFANQELLKHWMPVDLYVGGPEHAVGHLMYSRIWNRFLFDQGLSPVKEPFKKLVHQGMILGSNGIKMGKRFPEFVVNPSDVVEEYGADTLRLYEMFMGPLEVSKPWNDSNVQGAKRFITRVWNFFTEPENIIEEDDGKLTRIYHQTVKKVTNDFEALGYNTAISQMMIFVNEVYKAGRCPREFAEGLIKMLSCVCPHVGEEIWQRMGHDDTIAFEPWPVYDEAKTVEDTVEIAVQINGKTKGTLEIGKQDPKDEVIAKAKDVIADKLTGNIVKEIYVPGRIVNIVMKMAEPRLFYQDDCNLSLLEGKTIAIIGYGSQGHAHALNLKDSGCNVIIGLYEGSKSWKKAEEQGFKVYVAAEAAKQADIIMILINDELQADMYKKDIEPNLEPGNMLMFAHGFNIHFGCIKPPKDVDVAMIAPKAPGHTVRSEYQAGKGTPCLIAVEQDATGKAWDLALAYGLGIGGARAGLLETTFRTETETDLFGEQAVLCGGVCALMQAGFETLCEAGYDPRNAYFECIHEMKLIVDLIYQSGFAGMRYSISNTAEYGDYVTGPKIVTAETKKAMKKILSDIQDGTFAKEFLLDMSPAGRQVHFKAMRKLASEHPSEKVGEEIRKLYSWNDESDKLINNMRRQALSLLVENNPGVTSRISGLFSRRGFNIDSFSSGVTADPRYTRITIVASGDEQVLEQIEKQLAKLEDVLDIKKLEPGLSVCRELIMIKIRALDTQRQAVMNVTEIFHGKIVDVTHDSMIIELIGTQDKLDKFIDLLSGYEILELARTGITGLTRGSDDVVMLDMANVDLTKYGITGTTEIVHNPSYETLFEEETKAGLEGYEVGKETELGAVNVKTGIYTGRSPKDKYIVMDENSKDTVWWNTPEYPNDNHPMKEDVWATVKDLAKKELCNKKLFVVDAFCGANKDTRMAVRFIVEVAWQAHFVTNMFIKPSAEELESFEPDFVVYNASKAKVENYKELGLNSETCVAFNITSKEQVIINTWYGGEMKKGMFSMMNYFLPLKGIASMHCSANADMNGENTAIFFGLSGTGKTTLSTDPKRLLIGDDEHGWDDNGVFNFEGGCYAKVIGLDKESEPDIYNAIRRDALLENVTVADDGKIDFEDKSVTENTRVSYPINHITNIVKPVSSAPAAKNVIFLSADAFGVLPPVSILTPEQTQYYFLSGFTAKLAGTERGITEPTPTFSACFGQAFLELHPTKYAAELVKKMEKSGAKAYLVNTGWNGTGKRITIKDTRGIIDAILSGAILDAPTKKIPMFDFEVPTELPGVDSGILDPRDTYADASEWEAKAKDLAERFNKNFVKYTTNEAGKALVAAGPQLMAILEVRNIEKHFGRTNVLKDVSFSMEEGNALAIIGSSGSGKTTLLRCLNFLERPDSGQIIVNGETLFDASEAGKDKDAELRKKRLHFGMVFQQFNLFPQYTALENVTLAERLLAQETPEFKKDKKAILTRIDEHGKELLDRMGLAERMNHYPHQLSGGQQQRVAIARALALKPDILCFDEPTSALDPELTGEVLKVIRSLAQQNTTMIIVTHEMAFARDVADQVIFMDGGVIVEHGDPHEVIDHPKEERTRQFLTRYANGMFWNVTQALMSGLWTTFEIFILTLIFALPLGLIFAFGLLSRFKPVKAVMNVFVWVIRGTPLMLQLIIIFYGPGLWLHQAIWSGDETGRITATVVAFVINYACYFSVIFRGGIEGVPAGQREAGQVLGMTKQQIFFKITLLQMIKRVVPPMSNEIITLVKDTSLARIIAAYELTFAGAAFMKSDGLTWPLFYTGVFYLVFVGILTLLFNYIEKKLDYFRMRRGLALLLTATLALSMTACGGSKGAGTQKSEKGDGMTYAVEAGSAGEAVAKEKGFNYNSVSSQADALMEVKSGTSDAAIIDLLMAGAMIGEGTSYPDLVHTTELTSEKYGVGCRKGSDLASYINSVLADSYADGSAQEIAKKYGVQDSLLEQEPCEFKQSDSDSDVDYIKSQGKMIVGITEFEPMDYKDKDDKWIGFDADMARLVGEKLGVDVEFVVIDWDNKVMELDSKKIDVVWNGMTLTDEVTKSMECTNAYCNNAQVVVEREKMENLMFCLNATGPIFLMMVFGLFLRKVGILDEDFANRMNKFVFKIPLPFLLFSDLASVDFSRVWNIKFIVFCFVVTLISITISTLVSCLWRDKSIRGEFIQASYRSSAALLGIAFIQNIYGNAGMAPVMIIGSVPLYNVMAVIVLSFFKPGQNGIDKAVLKKTFKGIVTNPIILGIVAGLLWSAIGLPFAGIPAKAVTSIGNMATPMGLMAMGATFDLKKASAKAKPAFAATFIKLVGFVAVFLPIAVAFGFRDSELIAILVMLGSATTVSCFVMARNMGHEGVISSTTIMLTTLLSAFTLTLWLYIIKSLGLVMKILILSCDTGEGHNSAGKAIKEAAEHKGHSVTMIDMFLLSGKGTSHAVSGAYIGIVKHIPFFFGLLYKVGMLISSDKRKSPVYFANALLCKKLSAYIESNGFDAVVTPHLYPAETLSCMKRKNLLHIPAVAVGTDYTCIPFWEETNMDYYVIPHDDLTDEFAKRGIPENKLLPLGIPVRQAFCTRTAKAAARTRLHLPSDVPIFLVMSGSMGFGKLAVFAAELAIRCHNNEHIVIICGNNTKIKRILQNEFKFNKRVHVIGYTNQVSLFMDACDVIYTKPGGLTSTEALVKNIPIVHTAPIPGCEAANVAFFKKRHLSVSSKRLSKQIELGKIMIENKELNAEMIRAQRRERKPYAAIQIVGLLEELTHTDTTDMLYFLFTLLGFVLGSTLFAYWIPKLLKNIDICTLPDDHNPGVSNAFMYGGFLCGILSLICELAKGFIPVYIGQKCLDINSLLFVPVLVAPVFGHAFPFLQKQKGGKAITASFGVLLGLFPELHPAVYLAFFFIFFSVVVIINPHSLRSILTFGFFAFNVLLTIKTASIQIGCFIIAVIVIYRHLIKHNNGPVSISILHQRMGTGCIIYTIVAYTVGWIGGTSSILHGIIAAIFQIALAFIIWGGFMLHYRNDVRKMNEKIKELMLLIAGIFYSGLGLALASAGIIFTRNYLFYRQLIEKREGQMQAIVETLFDTVYLFSVITIGILMIRKSKGNRQFTMFGIMSVILGSGDAFHLVPRAAALCTTGLENFTVQLGLGKWITSVTMTIFYVVLYHIWRERYQIKGYKAATAAIYGLAGLRIVLCMMPQNAWLSADSPLSWGIYRNIPFALMGLIIIVLFYKSAKENNDSSFRWMWLTIVLSFAFYIPVVLLADVIPMIGMLMIPKTCAYVWTVLIGYKAMKKEIAMNHLATSKEDILAASRELIKENGWTALSIRAVASRCSVSAGTIYNYYESKADLLGDTIESIWREIFFNPEDEQAFNDVAACISWIYKRLEYGNEQFPGFFSLHSLGFMKDEKTDGKKKMLQTWGHILNGLCDILKNDRKIRPDVFDEQFTEKQFADILFSLILVSMIRQDYNPSSILMLINKTLYMKRMSLQWRLTCITTLCIAIICGCLTMFVYKNGVHYIDSLQDAVESQGDEKGNKSDEIYISIPDDKWDEFADEFSVQVYNNKADYKRNSLIITVLLALLGGVVTYFISGHALRPIREFSDKIEEVQAQNLSDSRIEENNVKELNQLGISYNKMLERLSDAFEIQRQFTANAAHELRTPLALMQVQLDLYNSASHPGNDADTLQTIKMVTEQNDKLNRMVKTLLDMSELQTVGRDDKIILDAIVEEVLADLEPLAVEKNIKLIGKCEDATMIGSDILIYRLVYNLVENAIKYNHPLGQVTVTAYQRNKHVYVSVEDTGSGIPKELRERVFEPFFRVDKSRSRELGGVGLGLALVREIVRVHDGSICIKSGKTGGTIFEVTFAQHSMMRLLIVEDEKPICDMVAKSLYAAGYEVDTCYDGKEALECILSENYDLIVLDLNLPGMDGMELLKELRKYNDETKVLILSARGQIADKVEGLDAGANDYMEKPFHLQELEARIRSLTRRKFVQNDICLKCGEIKFDTIKREAYAKGEPVPLTRKENGILEYLLINIGRPVSQEELIEHVWDATADSFSGAIRVHMSSLRKKLKAKLGYDPILNKVGEGYKIREESDRMLKYQKTCQIILLILGVSMVSYGAVRGEAATVLGKAIKLCLECVGIGMDKKKKLLSKKLAKIRGWIQAAATLLTNIHIPNLFKGKIYQGNAKTVCVPGLNCYSCPAATGACPIGAFQAVVGSSKFKFSYYITGFFILLGVTLGRFICGFLCPFGWFQDLLHKIPGKKLSTAKLKPLRYLKYVILIVFVILLPMLVTNSIGMGDPFFCKYICPQGVLEGAIPLSIGNAAIRSALGKLFSFKCMILIAVIVLSILFYRPFCKWICPLGAIYSLFNKVSLLKITVDSSKCVGCGQCSKACKMDVDVCKTPDHPECIRCGACIKACPKDAICYRFIGKACQKNDNRMKNKLSFISIFTLCIALSLTACGVKQASTTDSKNTQTEAGSEASGKSDSRLDDLYQQENQLFADHADVWNKAFGMMSKSDADPNGNYADYLAGTVESNKDSFTDDELKTLNEDIETIRKIEEQIAELENKNTSSDDNKKDSSKASSVFSNFSGEDFDGNKVDDSLFSGNAVTVVNFWFTGCKPCVAELSKLNELNDAIKSMGGEVVGINTETFDGNKTAIKEAASVLESQGVKYRNLSIDSSSAAGKYASEIMAFPTTILVDRNGNIVGEPMLGGIDNKDNYDALMKQIQSVIDADSTNKMIQIENVSFQYNNSEKGALKDVSISVDKGECVLLCGASGCGKTTITRLINGLIPHFYEGEYSGNVSVYGMNVQSEELYNISKKVGSVFQNPRSQFFCMDTTSEVAFGCENMGLVENDINERVKLAVSELEMENLMDRDIFKLSGGEKQRVACGSVTAMQPDVFVLDEPTSNLDKESIERLKNTLLLWKKQGKTIVIAEHRLYWLKEICDRVVYLEHGRIMFDITMQEFLKFSEQKLQNLGLRTMQPHCDESSKRHEYIAKKSDIVLKNYYFSYGEKKVLEFGDMQLPKNELIAITGQNGAGKSTFVRCFCGLEKKFKGQTVIEEKQYKPKEMLRKCYLVMQDVNHQLFCESVEDEVLLGASDTGKEIKERAKEIMQKLGIWEFRDKHPMSLSGGQKQRVAIASSVLAEKEILIFDEPTSGLDYYHMVSTAQLFKELRDMGKSIFIITHDRELIERCCNYEFYVADRQATLYGLMIHTYVTFDPRTKMLLLMTMAIFVLGGAGDKLFGAYLPLFCLLPFVLFILVGKWKRAAGYIILYSVFYLLTVFVLPHMTGFIGFILLAFCGIMTRFLPGIMAGTYLMQTTTVSEFSSAMSRMHVTDKLTIPLSVMFRFFPTIADEFRAINDAMRMRDIRFGGKNVDKMIEYRLIPLMVCSAKLGEELNAAAITRGLGGDVKRTNVCRIGFHFQDYIVVLICFIPYVIWSVSMISRLFMMKNKKKLKGKDLINIGIYAAIYCVIMTAVAMLGFIPIMMPLLCVIVPIFGGIPYMLFLTKVDKFGMITIYAMIVGLFLWITGMGYWPFIFGIICGVITDLIVKSGNYKSSKKNILSCGVFNLIIFGNFVPMFMNIEAYFSTRQSFGQEYITKMTDIFANSWLIPLLIAACVICGWIGGVFGKSLLKKHFEKAGIAMFEILAKFFRFSGRENGNKFKLSMVIGLVEALASAMKIPAIMYILIGLLGGKPIGKYIGGSLAIMVIAIVIAVICKRSSTVLQTEGGYNASAFTRIKIAEHLRYLPMGYFNSNSIGEISSVTTNTMESLGDIAARVVMLTTQGILETLMIILMLLVFDWRIGLISAAGVLIFFGVNSMMQNAGKKDSEQKVVCDTELVSQIMEYLQGISEVKSYNLLGKQAKRLNDANDASAKINTRMEMVFVPYHFLQSVITKITGAVIVACSAYFYINGTMSAVYAIGMTISAFMLYASLECTGNYSSLLHVVSVCVDKANAILELDTMDIDGKEIQPENYDIRLSDVTFSYDKRKIIDGVSLSIPEKTTTAIVGPSGGGKSTLCNLIARFWDVDSGEVTLGGVNVKEYSMNSLMNNFAFVFQSVYLFADTIENNIKFGRQDASHEEVVEAAKKACCHEFISKLPNGYNTVIGEGGATLSGGEKQRISIARAIMKDAPIIILDEATANVDPENEKELVEAVDALTKEKTIIMIAHRLKTVRHADQIVVVEKGQIVQKGTHEQLMKQEGIYKRFVDAREQAVSWKLARMKEKKKSAVSWILTWAGQKRSAYVWSVLLAIGNVIFKILPYFIIADVVKLFLNGEKEFEKYLIKAVLIALSFVIAELFHSLSTSLSHKATFVVLANIRKACCDKLARVPLGYVKDTPSGTFKNIMVERIDSIETTLAHIVPEFTSNLLAPVVILIYFFLTDYRLALWSLVPIVVGLFSYFGMMLDYKPSFERTVKTTKELNDAAVEYIDGIEVIKAFGKTESSYAKFTKAARKYADSFISWMRRCSVYHALMMVVTPYTLLTVLPFGAYYVSNKTLELSDFVICIILSLGIVGPLITVGSYTDDLGKIGVIVDEIAGILEQPELKRPDKSKDVPKDNSIILENVRFGYHDKEILHGVNMELKAGTVNAIVGPSGSGKSTIAKLIASLWDVDSGSIKIGGVDVKELALTDFNRKIAYVAQDNYLFNETVRENIRQGNPNATDEQVVEVTKKSGCYEFIMQLENGFDTVVGGAGGHLSGGERQRISIARAMLKDAPIVILDEATAYTDPENEAILQKSIAKLVDGKTLIVIAHRLSTVNDSDQIFVVNDGNVTAHGTHEQLLVSCPLYKEMWNAHISVKDTVKEGEDGMDQMIDYIYEHYDNFRLLLKCGDSGKFETFIHNMVDREMRSSLEYVKKMKEDGIEIPIVGESLMHMIYTGFFSSIFQIIEHDIDKETAKRNVHKLREFNTGGWERLWNVKFMNKKTVALTEEQYKLIITTIRQGFICSDGHIVKPNNRVATALSLEANLGLRISDILHLRLSDIIRDGDRYRLNIIEQKTQKRREFTVPTDIYIYIQSYALENNIHPNAKLFDISERAVTKHLKCKLRSNGMPVPLLRNGYSIFNGTKYRMNIEIHERNRFNELLHKIHNNIEDTAFKLLLSIPEDMIPSSLMNWTEHYIDKRMNELQYQLIRDNWRSVELEKAAVQLNSKNMLALSDAQRKANDKYIKNNYKQVKLSMPKEEAETLDNYCTAKNCSKAGFIRQAIKEKMEREPMYVITNGNTYITKSRSGKVGKTSNILEAEWFDSIDIANIIFQHAPGKTKGYYIKDLETCYVYKRYTNGKIKFPREVRELIYNNAEGKCVLCGRKITYDDMTLDHIKPLANGGKNTVTNLQCTCEACNKFKGSILPEDFRERVTEIFMYQTSENTKHKIMWSITRRLLSLCIKLMKALLINVMENNTEVVEANELKDYYRLIGCTTIDIVNRSIKGKRYEIICDDEGTFKADPRISAIDDMGNAMLVGNLIVCGQADEEGNLTDLTEADIKHIKEFTNIMGTRKHPEGLLMICQMEYMELTRLTDNERKFAEDNHRLIYSFLSSKGYSIEDYYNIVVFGYLKAIQVYSKRADLQEKYKFSVIAWKYMQSEIGNHFRTETAQKRATEESLLSLDADNDDTENLYNMVGGKSAESNIMENAAVQDILSKLTETQKEIVCMKAEGYNNTEICTLIELPQSSFYKEMTRIKKTLNSRRMIKRPLSDSPLTAEERVFAEAHHNLMYRYMRIHDLDIEEWYDRLIIAYLNSVKKYLRYEKLQSLKFEQVFFRTLDNARSNYWRDLNRYKRCPEGGIWSIEGMEAINNNEAEADDCDFYNLLKDDRISLNDIVIDSLYTSALIDELEKEQYKKIVLLLIEGYSGKEISNMLHISYGRYSRYIAEIKDIILMCIGMSKLQHLFKVGQNVKCRIDGIMQKGIVTEVHDDHIIVDIPEINNHCWFEEGFNLDCVYPIYNFMCMTKKELENKINELRSLKALQQETADELRAIEVEIIDYMKENNLDTEITDTAKVTYKPQTRTTLDKKRLEEDLGDLTDYEKVTTYNVLRVKMSINVYELVTNRIIEQLENNIIPWEKPWSGTIDGAFNRVSKKPYSILNQMLLKYNGEYATFKQWQELGGHIRKAEKSEIIVFWKMYPIKEKQDDGTEIIKTIPLLKYINVFHISQVDGVEPLKQKVTHDIEPIEKAEKILNDYWNRENITIEHVKGDKAFYSPMFDKIQLPLFEQFKQSEEYYSTAFHESVHSTMKTSRCNRQEDRKGKVVSFGSEEYSKEELVAEVGSAQLMNIVGIETTKSFRNSTAYIQSWLKVLRNDNKFIVSASSKAEKAVNYILGNQMSKSIKNIATATVIVIMLIGAYYLGTTQAKTETVETIPQGYISLDKCIPLDDVAYYYINSYGYPCFELKDTRYQLNNSSNMSYDDILNDLPLDTEYQNDCIDMKQVTDFTATENSLQLYTADGNGYYWEKMAEPNNSALAKSQSDLATQMGISVDTLQNYKMLADMIPKLEDLVIQGLMGILELLIIVCTLALLAIFIVIVIKSAKQDNQKTGTYYREHIDDTNESVEENTQTIQQTIPTQQKQQDEKESVLAMVFYVIGLITILIGFVSAISEANIIYFLTGGISGLLFLGFGEIISLLYSICKKLDKMKNKSGFILNLIAMIYILFSGIGIGVSNKLPWWLMFLAIIGFIITTILGMIVSIKETKVLKYIVLVLAIICLMVDTAGLFMFDIALFILLQMCTLIPSILALIASIKNVKMVTCMLVGCDSQAKPNTETVKKADSEKTTEVTKKETETQPTEQDTQKAQEPIVGNAAGVANWHDTVEQIKEKESLTLSLDDDGSGAIVYNTTLNGNDTWLRYYTDSDYGCYEVSYLIYDFGLDTNWCKSEFDSLVSLLTSKYGDPSVNGVKQLTDLAGVSGEDVDFLVGNIQYEAIWNLDDKVIDIMAYYDSSSNNLKIELDYLAPDYSGQGCVNSDTNGLMKPLKNRVSLTLDEDIIEKIKQLAENDDRSFSQYVNMVLKEYLSKIDRATEKMISEIKNNETKICKKCGRELPLSKYSKIYGKAWSVTCKDCIIDTRTKKYYENGLTLYNTDKSMRTKRNYKTIHKSRILTKAVSGIAHIAKDERFVRLLDYKDTWISNYGRSIVKDGDRYKLLRGSCSHDDEELYYTLDKNVYFKTKKEWGHRRKKVKASDLVIQTFIVNYDMLNNTCIWHENNDVKDNYYKHLYPVTELQYGALKQIYDENGAVTETQIMDIINSVEYKPDNWNPWHFRRTYEGVGYLGTDDVDYNSDEYNRWKNMIQRCYNKKIHVYKPYYKDKSVCEEWLNFANFRIWYREHIILNEKLDLDKDLLVPNNNVYSPETCAFMTHYLNTVFEGRGVKRTIEKKEDGFKVQMDILSKKMDVGTFDTKEEAYKGFSRFKEKYIKELAESCKGKVQDCVYNAMLNWKVEIADMTKELSIEKIKKELIDNISNNSEILEYFENYLQDEEYHKHCLKEYGMKYIKDNFIFANDMSMSDNCNFISVEVNEEEGTSLDGIKMYYRVIIMVTLEDYKDIDTISVLLGKIATELYPDRFSYKNTVYYHKNRKQLENRKQLARVIKFTVGMSNILHIKDAYFELPEKCKDDIGCMVTMLDIHLQQNKDVSEDDTCNIEYEIIVKENMLKKEFLDKVAENAGLYKYQAYMFWKAFEEVLIEELRQGEKIKIDCFGTFYTSESKEYKITNTIAKNSECQVPAQKRIRLKPSKIIKRKLNSKGIEENEMFGTVTRYFKDKGYGFIRGDNGKSYFIHNSKLNGEYIECDYYVFFRPFHNNKGNCAEIISVIESPERSKMPIKTQNDLPVKEILERENIFVMDENRASHQNIRQLEIAIVNLMPLKEDTELQILRSLSNTPIQVNVTFVTTSTHEATHTSLSHLNKFYETFDDIKDRYFDGMIITGAPVELMEYEEVDYWDEICSIMEWSKTHAFSTLHLCWGAQAGLYYHYGIPKRVLPKKKFGVYAHHVKNRKVPLVRGFDDVFYAPHSRHTEVLKEDILKHQELTILAESDDAGVFLLMDQDGKKIFVMGHPEYDRYTLHNEYERDKKKGLDIDMPVNYYPDNDDTQKPLLQWRSHGNILYSNWLNYYVYQEVPYEFINNREIIGKMENNKIKDKIDELVESLNRASKAYYNGADEIMPNYEWDALFDELTQLEKETGYIRQDSPTQNAGYEAEAGNREPHEYPALSLAKTKSIEELKKWAGNMPIWLSWKLDGLTLVLTYDGGRLVKILTRGNGTVGSNITFLQDAISGFPKEIPYKGHMVVRGEATISYTDFKLLNDTIEDDDEKYANPRNLASGTLNLDDVEEVKRRHVVFYAFTLVHIDDDIISWGDRMSYLSDMKFNVVKREATDAAGLEEAVKRWTRDVESGKMDVPVDGLVICYDDTAYAAGGSITGHHATRAGFAFKWQDEAVDTRLRYIEWSCAVSTISPVAVFEPVQIEGTTVSRASLCNLTEIERLGVGKECTLSVIKANKIIPKCIAVKDAVGAVEIPKECPVCHHPTRIFVSKNSGVKTLHCTNPDCTAKNVKKFSRFVSKSGMDIDGLSVQTMLKFINEGFIKQFPDIYHLPEHFDKISSMEGFGEKSCTNMQTAIEKSRHVHPVNLIFALCIPLIGTDAGKKIVNAIGFDGFADRMRNATDFVDIDGIGQEKSGSILEWYANPKNSAMFEALIKELDIEKVDIKDMSEGSLNGKTFVITGDVHYFANRSEFKAYVESQGGKVTGSVSKKTDYLVNNDTESTTSKNKKAKELGIPIISEDTFIEMFGRMEENGVRINKFLSEAGVCSRREADRQIEAGKVGIDGVTAKTGDRVLKGQTVTYNGQVVSKEEEMILIALNKPAGIVCTAEKREKNNVIDYINYPKRIYPIGRLDKDSEGLLLLTNNGEIVNKMMRSGNRHEKEYIVTVNKTISDSFIRGLAGGVPLVELGVTTRKCHVKKLSSKQFKIILTQGYNRQIRRMCEYFGYRVVKLERVRIMNIELGDLPRGKYRAVTPLEYKGLKRLIADSSNQPVMPDMNKNHSDKKHTDKKHTDKKYPDRRAKMKDFFNKETLDNIKQFCAENKKYVGVAGVLVGLILILIVVVAGGNNGRQSNTEAGSQTEISVKDFEFEKDYTNDAKDDISTLLADYYKAYVGDDLDTLGKLATPMSDNEKSYIGVVSQYYESVNDITPYTKNGLKKGTYFVSVKNSIKFTGVDTQAPTLDFFYIETDKDGKLFINNVYSNFNRTYCENELDDDIMELISKYTASSEFADLHEEVQKAYEQAVGSDANLKTMLETTLTGAIKQWYTSSGIANLKKSDADTQTTEADTQQADDASQSGDQQTTDANAGQTTDQQTTDANAGQTTDQQTTDTNAANQQTAEQPQAPAEYQVVTKDVVKVRDGASTDAKELGLLKEQVTLTAYGTEGDWTIVSYSAGTNGRAYIKTENLQTVGQMKYIVKFLSIIIVCIKSYNKTLKAYNKKKVTLKKSKRCDINSWMSFTFLNQLPTPAQIKEEYPLSKELTELKAKRDAMISDVICGKDDRFLVIIGPCSADNEDSVCDYVSRLTNIQEDVKDRVIIIPRVYTNKPRTTGEGYKGIASQPDPEKAPDMVEGLIAMRKMHIRAIAESGLTCADEMLYPENWGYVEDLLSYVAIGARSVEDQQHRLTVSGFDVASGMKNPTSGDFSVMLNSVYAAQHPHHFVYRGYEVETSGNPLTHVVLRGAVSKHGNTTTNYHYEDLIRLHEMYDKMDVVNQAAIIDTNHSNSGKKFKEQIRIAKEVMHNRQLSSDIKSLVKGLMIESYIEEGSQKIGEHVYGKSITDPCLGWEDSKKLIYDIAEMNSMIDEMKRQKRELVYKGSILDIYKDTMQFANGKTEEWDFVSHRKGAAAVLPVLDDGRIIMVRQYRNALERETIEIPAGCRDFVGEDTRLCAERELKEETGYSSDDISFLLSLRTTVAFCDEEVDVYLAKNLKKGKQHLDDAESIDVEIYTLKELCDMIYAGKIQDSKTVSAVLAYSNMIKMQRFTLPRDLYHGKGALEALKSFEGKKAIICVGGGSMKRFGFLDKAEAYLKEAGMEVKLFEGIEPDPSVETVMKGAAAMAEFEPDWIVAIGGGSPIDAAKAMWIKYEYPDITFEDMCKVFGIPKLRKKAHFCAISSTSGTATEVTAFSIITDYEKGIKYPIADFEITPDVAIVDPELAETMPQKLVAHTGMDAMTHAIEAYVSTANSDFTDPLALHAIEMIQHDLIDSYNGDMAKRDAMHNAQCLAGMAFSNALLGIVHSMAHKTGAAFADYGAHIIHGAANAMYLPKVIAFNAKDETAKERYGVIADFMKLGGETLDEKVELLIKYLRGMNDDLNIPHCIKNYGADSYPTEQGFVPEEVFLERLPEIAANAILDACTGSNPRQPSQEEMEKLLKCCYYDTEVDFMLPYIITAVVSIIITALIVWFAAALYQKKSANSKIGNAEEKARGIIDEAVKTAEEKKRESMLEIKEESIKAKNDLDKEIKERRNEISRNERRIVQKEENVDKKLEAIEKREAGFVVKEEELKKQKIEISKLNEQRLQELERISGLTSEQAKEYLLKTIEEDVKLDTAKMIKEMENKAKEEANRKAKDYVVTAIQKCAADHVSETTISVVSLPNDEMKGRIIGREGRNIRTLETMTGVDLIIDDTPEAVILSSFDPIRREVARIALEKLIVDGRIHPARIEEMVEKAQKEVDNMIREEGEAATLEVGIHGIHPELVRLLGKMKFRTSYGQNALKHSIEVAQLAGLLAAEIGEDVRMAKRAGLLHDIGKAVDHEMEGSHIQLGAELCKKYKESPLVINAVESHHGDVEPESLIACLVQAADTISAARPGARRETLETYSNRLQQLEDITNGYKGVEKSFAIQAGREIRIMVVPEQVSDADMVIMARDISKQIESELEYPGQIKVNVIRESRIVDYAKMIEITGYENIGKGKYRTTFDNGTTCVLYRTEAVRYSIMEGAFISEADYEKLITEVVGKRAKKRALHLLEQMDRSERKLREKLTQGGYPDCCVDAAIDYVKSFHYLDDYRFASTYVRYHQDSLSRRQLEQKLMTKGIGRDDINCAIDSEYTADEEKHIAKLLEKKHYDPDNCDEKEFRRIYQFLMRRGFKSSQILSAMRSQLPMAKEDKLKALDAAIAQIEKQYGKGSVMKLGDNSANMNVETVPTGSLSLDIALGLGGLPKGRIIEVYGPESSGKTTVALHCVAEVQKRGGIAGFIDAEHALDPVYARNIGVDIDNLYISQPDCGEQALEITETMVRSGAVDIVVVDSVAALVPKAEIDGDMGDSHVGLQARLMSQALRKLTAVISKSNCIVIFINQLREKVGVMFGNPETTTGGRALKFYSSVRLDVRRTESLKQAGEIVGNHVRVKVVKNKIAPPFREAEFDIMFGQGISREGDVLDLAVNAGIVNKSGAWYAYEGDKIGQGRENAKTYIHENPAFFDMLEAKVRDFYFTQPEDEDAAVQEDSEKSEADEQMDNLRQEIEKRRTFAIISHPDAGKTTLTEKFLLYGGAINQAGSVKGKATAKHAVSDWMEIEKQRGISVTSSVLQFNYDGYCINILDTPGHQDFSEDTYRTLMAADSAVMVIDASKGVEAQTRKLFKVCVMRHIPIFTFINKMDRDANDTFELLDDIEKELGIATCPINWPIGSGKQFKGVYDRNSKEVMTFADTLKGTKEGSEKIIHIDDPALSDEIGEEFKSQLMDEIELLDGASADFDMELVTKGELSPVFFGSALTNFGVETFLQHFLKMTYAPTARQSDIGMIDPFSEDFSAFVFKIQANMNKNHRDRIAFMRICSGQFTAGMEVYHVQGGKSLKLSQPQQMMADERKIVDKAYAGDIIGVFDPGVYSIGDTLTTAKDKFEFEGIPTFAPEHFARVSLVDSMKRKQFVKGVTQIAQEGAIQMFQEYKGGMEEIIVGVVGVLQFDVLKFRLENEYNVQIRLENLPYEHIRWIENKDEVNVDTINGTSDMKKVVDMKGNPLLLFINEWSIGMTLDRNDGLVLTEFGRNMKKGSHKNQIIITTLALLLAVVGYISYDNRDTFMNAKDVLSTEIEAVNGKADTKESKECEDTQASDEVALETDSTEEILNAGETVLTSASTESEECVAQVKLGREQVRSKNKEALQKIIDDAGVSEAEKKSAVDAMVKLTENAQMEEDAQMMLEAKGFKNAVVSLSDECCDVIVGKEDVTDEKRAQIEDIIKRKTNIGASNIVISTMDMILLVGVLLLIVVLPVKEDKNTCSNSQKKAKAKSVSESTCDDEEYEKLLEKKLEGILERMDGVGEVSVMITLSDDGTRIVDKDTKESSESIEKTTVIYDDEDASVPYVTSTDKPTVSGVLVVAQGGGNPQVNNDISNAVSALFDVPMHKIKIAKMISREEMKSYLYLAFFFMVMTYLTPKEQYRRYFRFMLGVFLAVIILKPLAAGYEYDMRFAELTKKIEGISYEYDADTTDLFTAFEAEENMICKKYILIIIILAVVFLPQCFVYASDTEITDKIEQQMLEKIDMSEIEKYSKDYLPDRLSFSDIVDAILAGDQKAGEKICEYIYELFFYEIAAVRPVIINVLCYTILFMVFSRLIFWRQDYVYNVSFLFMYASVISMLMASFFVLSDVAKGCIDVLLTYLTALVPAYATVLLASGKGFSASGFYMLAFVLIYVVEWLIKLVLIPGIHLFLVLEVLNHVSSEKKLEKLAEFIESAVTKIMKASIKIVAGIGIVQAMIAPAKDKISESLILKSFQAIPGVGRLGQGAGEIMLGCAMLIKNSVGMAAIIVLFFIVLTPLVKTLIFSLMYRLLSAALQPVSDNRIVEGIEAVARAGNLYYIVIRDASILFFIVIAIVCASTSFMGGMLKIGIIGIAAVFFAVLLKRDRPELSMLLSVACGTIIFAFALERLGTTIEFFKGLLSKLPVEPEFFVTMVKMLGIAYIAEFSSSICKDCGHSAIASQIELFAKGAIVVMSIPVMSCLIELIGELFMEISIIFKIAALGIVITVLGQVLKHSGREEMTFLLSLAGLVIVLFWIVPYISELFKAMQDMFSLMLYDFMLLLEKGAFYLAGERMKAPQFFNSIRGKSEVFNEGCRRMGEVLSNRSCKSGEEGWKAVWEKVLCGRVSDEKIKKMIVEMGGAFFEKNAAAMEQRLKECALDIHKQIDFYRKDYVEKMKVICPVGILGGIMISIMLIMDIIDYLPQKMKAEAEAYMPCGLEEIRVRAGKQVQYMFAGGCRAGVYISHSDIEEMINYLSGYSFHAIAPQLAAGYFTVEGGHRVGIAGQMGCDGGKVTAVSEIASLNIRIAHQIRDVAMPLMPYIRDENSIYNTLVISRPGEGKTTFLRDCIRILSDGCDGKNALKVSVVDERSEIAACYLGVAQNDIGNSSDVLDNCPKSLGMRMLLRSMSPDVIAVDELGGESDIEALNQLVSCGIRILGSVHGTNADDLRRKMLPHAIERFVFIDHDEKGVRRYSIYDEAYRLLYSTVCGIGADKRLQQKKKGRYSDAVMKKLINLISEEVTKAFVSAGYDEKYGKVTLSNRPDLCEFQCNGAMAAAKEYKCAPFMISDKVAALLESDEMFESVESVKPGFLNIKMDTAFLAKYMNDMKDDEGRYGLEKAKKPLTIVVDYGGPNVAKPLHVGHLRSAVIGESVKRIAKFMGHNVIGDVHLGDWGLQMGLIITELRERKPDLVYFDESYTGEYPKEAPFTISELEDIYPTASGKSKSDESFKEAALLATKELQGGRRGYQALLSHIMNVSVTDLKRNYENLNVHFELWKGESDAQPYVPGMVEMMKEKGFAHMSEGALVVDVKEDTDTKEIPPCIILKSDGASLYSTTDLATLVMRMKENNPDRVIYLADARQSMHFIQVFRCARKTGIVPDTTELVHIGFGTMNGKDGKPFKTRDGGVMRLEYLLKEIDDEMLNKIKENQKEKENLNIDEAEAEQTAKTVALAAVKYGDLSNQASKDYIFDIDRFTSFEGNTGPYILYTIVRIKSILSKYEAKGGDISALKDAIMPAVNAGQKSLMLSLAKFNATIESAYEESAPHKICAYIYELANAFNGFYHDTKILSEENEELKKSYISLLVLTKEILEACIDMLGFSAPDRMMKIKTKQITVTAIMLAICLVSQFFKNLSIYITGPIINAALILTVLYAGMACGIILSIITPVTSFFITGSPVMAAIPAMFPCIMIGNIILVVCVGLLRKKCGKAAGFPVSIAIGAILKAVFMGIAIALIILPTFLPAPMHKMLPVLQLQFSVTQLITAVIGGVYAVIIAAVLKKTSLAQADMSVYKVDICGVTTSKLPILKDEEKEELFEKIKKGDKAAREKYIRGNLRLVLSVIRRFSNHNENMDDLFQIGCIGLMKSIDNFDPTIGVKFSTYAVPMIIGEVRRYLRDNSAYRIPRSLRDTAYQAINSKEKLSRKLVHEPSLAEISKDCGIPENDILYALDAIQTPLSLFDPVYTDGGDTLYVMDQISDKKNKEEAWVKNLVLDDALKLLDDRARQIIKLRFFEGKTQIEVAEEINISQAQVSRLEKNALKNMHGYLEAMLLTNGKKSKIIFVTEKYSRPTVTLLEDNSVLVLKDEKNIKIAAVLMRNKKVLFAVQAAMIAALYVVLTYITNLLGLASGTIQVRFSEALCILPVFTPAAIPGLFIGCLISNLITGGIIWDIIFGSIATLLGALGTYFLRKKKFVYTLPPVIANIIIVPLVLRYGYGFTTIYKGVDISLLFNAVTVGIGEIISICVLGSLLKGILSKYRNVIFKQDEAMKNRQKVFDKISLLIDAMNQEVLGYLGIKFEKREAYAVDYVSELLTMYKETTGLDETSFVSGRGRRKSIRQKQYEELHEYLERLKSYAYHIETCGEERNSYSKTDHDATFMRLKRDYMGNDQLLPAYNLQAAICDESGINFYPSGSAAKSMRQLKLPLEIEKLIDISDPVYTFCEVMDHIDLSRYFVEKGYKTGHPRCDAQKLLKVILFAFMENGICSLREIEKLCRNDIRYMYLLDGMKTPSFATFGNLIRNELTDSIEQIFEDINSYIFAKDHVDLQHTYIDGTKIEANANRYTWVMRISDIMRLGKSAIIFATIVVAFLAIIWLLGYKMIYKKILHGKKQISIGRIGLVCVLAVYIVVVLYVTLLRGGIGFGGFEYRANFKPFSSYKEAWYNFSAQEWRNLILNICMFVPFGFLLPICFGKIKRAWKIYLCGFGFALFIEVVQLITGRGVFETDDIINNTIGAMIGYGLFSVARLIFVAVCSRKKVQDNTNEVSGVAHDENVCERQNISIRKCLVAQLPLAFTIIAFAAVFIVYNSMEYGNLSIDNISNQNVDVSMADGVSLADEADPLDVYTIHRATEDEARELADGYFSKYGVLIDDSKTDIYDDTIIFYSTSLDDEGSNLSIWCDYEGPTVSFTDFSNLDDENSYADAGLSEEFVREKLENLGVVIPENAVFAPIEEYDAGNYRFTNDGEILDDGLYYKGTIECCINSSGKIANFRDSMIKYTPYKKVDVISEKEAYDRLCAGKFYFPDYDKDEQLSDLVVKSVKISYTPDSKGYYRPVYEFVANANQDTGKREISIMVDAMEIMIPSEEHKISMFPMDFEEFLWAIGDEVSAETIRYLIKNKKAAGRYKLFNSDVGLFITLAFKDKKYTENIIYNKLLSDKLDVNLGYVYENVVAQMLIAKGNNLFYYTMKSETSNHLYEIDFLTSVKDKICPLEVKSGNYRTHKSLDAFCNKFSNRIGSKYVVHTKDYKWENGIYYIPMYMVPFLMDLCMDKPVFKRKIYDEIYEWKENRSDKYALLIKGARRVGKSTIAEEFAKRSLNRIFSLTLLIQVRQLLIYLMICMIWIFSFCNCSSMVLEFIGADREVTGSCHYLTFGDTHILIDCGMEQGADLYVNQEIPVNPSLIDYVFVTHAHIDHSGLLPLIYNHGFRGTIFATKATTDLCNIMLKDSAHIQEFEAEWKNRKARRAGRPEVTPMYNVEDAQNVMQHFTPCDYNSVYEICPGLKVRFVDAGHLLGSSSIEMWVTEENVTKKIVFSGDIGNHNRPLIKDPQYVDSADYVVMESTYGNRLHDTPPDYAVELAKVINATFTRGGNLVIPAFSVGRTQEMLYFIRRIKTENLLPEHPNFEVYIDSPLAVEATNVFHENVSDCFDEEAMELISAGINPIKFPGLRVAVSSDESKMINFDKKPKVIISASGMCEAGRIRHHLKHNLWRSDSTVLFVGYQVPGTLGYALLNGAKKVKLFGEEIEVRASIVNLPGISGHADKNQLTEWLGAIKNKPEHVFIVHGEESTAESFANHVHETFGYDAVAPYSGDAYDLITNQKVADGSRKLVEKKAAYGMASREKTIFDRLVAAGQRLVSVIQKCQGMANKDLSKFADQINALCDKWDRMLPPPLETDEEKCCLIALVDKNVAMSKEQAKKQLIEHNLRLVVYLAKKFENTGVCVEDLISIGTIGLIKGINTFNPEKKIKLATYASRCIENEILMYLRRNNRVKLEVSFDEPLNTDWDGNELLLSDILGTDEDVIYKDLETEVEISLLKKAMLSLNERERQIIELRFGVNRVENKELTQKEVADILGISQSYISRLEKKIMARLKKEIQKMAMGASVCECVLLLLAGSYAFYKWTSVLVVVPLAARLAIGRQVGRKIPFLRLFALCMFVTVLTGGIVTALDSFFSSDATVMICFGFVISYIVLKCFCERSNESRRLYRVTLLKDGKRACATALYDTGNLLKKQPQQIPVHIGGSALFDIVGEDAGFFDVPYKSLGNDGGSIKVCEFDEMTVMKGNGKLILHNVLVGRASDSLFEDNAYDMILNEAVFSNKTGMENTLGKMLEIRTNEADNSAKIIVIGVGGAGNNAVNRMIDENIGGVEFIGINTDKQALQLCKAPTLIQIGEKLTKGLGAGAQPEIGQKAAEESAEELQAAVKGADMVFVTCGMGGGTGTGAAPVVAKIAKDQGILTVGVVTKPFKFEAKQRMINAVSGIERLKESVDTLIVIPNDKLLEIVDRRTTMPDALKKADEVLQQAVQGITDLINLPALINLDFADVQTVMKDKGMAHIGIGSAQGDDKAIEAVKLAVASPLLETKINGATHVIINISGDISLMDANDAASYVQDLAGEDANIIFGAKFDESMTDQASITVIATGLEDVSEKIDMPGKQAATGAGMAGGMQNRMVYPNQTAARPVSGMGTQSTATAGLHTAAQQQQTAPAHAYTGIQKPRQPESTVKPVEINIPDFLKNSRRMIKKKRKHKKRLKHFFMGLLITIAVLAILFLIALKLFTVKRVVVEGNELYDQKTIEDAVLNDKYSWNSLYVYLKYKVKDTKKIPFIDTMSISLNSPHTLHISVYEKGMLGYIYIPGINENAYFDKDGFVVETSSDTVPGVPCIDGISCDKVVLYEKLPIKQTMLKDILELTQGLKRQDLVPDSVDYGAQNAPVVKYGNVSVIIGDTTKLTRKIERLKAIMPSLEEQSGTLHLESWTEETTNIVFDKSEMAGKRRRSSKNKEKKEKGIPYFDYNLLFIVIFLLCFGLVMLYSSSAYTSAIKNHDSMHYLKLQIRNIVLGLIPMVFLAKVDYRYWKKLGFFAYIVSLILCVLVFVPKIGSSSHGSSRWIGIGPIQFQPSEVAKIAVILFMAMIIDKIPKQFDKFLSLVKVLAMLIPLIIVVAISNLSTAVIIIGISVCMLFVASPKYLQFIIVAVAVVVFAVAFVMLAGYRSTRIEAWLHPETAGTDAVFQTMMGLYAIGSGGLFGKGLGESLQKLGNVPESQNDMIFTIICEELGLFGAICLILLFILLIWRMMVIANNARDLYGSLLVIGVMSHIAIQVILNIAVVTNSLPNTGVILPFISYGGTSIIFLMAEIGLVLSVSRGIRLENVMSLQGKKVLVVGTGKSGIAATELLCANGIDTVLFDGNKELDSKTLYEKAPKLKEVPLILGDLTDEQIDEFDVAVLSPGVPTDIPMVNALRDRGVKIWGEIELAYTFGAGEIIAITGTNGKTTTTALTGEIMKNYFKDVRVVGNIGIPYTSMVTGSTGETVTVAEISSFQLETIDTFKPHVSAILNITPDHLNRHHTMENYIRAKEDITKNQTADDYCVLNYEDEVLRDFAAKCPAKVIFFSSKSELSEGFYLDGDIIIYAHDGVRDEVIDVNELNLLGKHNFENVMAACAMSISFGVPMDKIVEVLKVFKAVEHRIEYVTEKRGVRFYNDSKGTNPDAAIQGIRAMNRPTLLIGGGYDKQSEYDEWIEAFDGKVKELVLIGQTADKIEECAHRHGFMNTVKKDTFEDAVNYCYEHAVSGDAVLLSPACASWGMFPNYEERGRIFKEIVKGFKEMILNNTRYRRKICVFCSILTAVLIALCFRLFYLMIVKGGYYSKKASALQERERDIAGIRGDIVDRNERIIATNETAYNISVIHNQITDKEAVISVLSSELSIDEKTIRSKVDKVTSIEKIKNNVSKKTGDKILSYGLAGIKVDESSVRYYPLDELFSKVIGFAGADGQGVVGLETTYDEILRGTQGRIYTVCDGRGVEVKGYKERREAPKKGDTLVTTLDINIQKVCEKNAMMAYAQNLADSVSIIALNPKNGEIYAMTDYPEYNLNDPFSCENHDEAWRNGCVSDTYEPGSVFKIITAGIALEEDVVSLDDSFYCPGYITVEDRRIHCHKRTGHGSETFVQGIQNSCNPVFIDLGLRIGSERYYADFMRFGLLDKTGIDLPGEAATIMHQPDKIGQVELATISFGQSFQLTPIELMTTVSSLINGGNRITPHIGKEIHGTEGTVKEVLSFEQTSGICSEETSDTLRKLLEGVVAEGSGKNAKVEGYAIGGKTATSQTLPRSDNVYIASFLGFYPVDDPALMVLVKINNPKGGAYYGGTIAAPVAAEIFREIIPYAQEIGVFNMAARTRKRPVRKIGRKMKTKLFALFMLIVVAMLGLIGRLMFIEYTSGDAYTKKVLSLQSYDSKTIPFQRGNIVDSNGTVLATSVAVYNVVLDCSVMTSKKEYITPTIDALTQCFPDLDRATLEDYANNSKDNKYIVLLKKLSYDAIQPFVQLQDATDEKGNLKNPNIKGVWFETEYQRNYPFKTLASSVIGFTSAGNVGTTGLENYYNDTLNGVNGREYGYLNADNDFQKTVIAAQNGNTLYTTIDANIQSIVEDKIKLFSDTYANNAREGLGAENIAVVIENPKNGEILAMANYPNFDLNDPKNMKDYYTQEQLNAMSDDDTLNTLNKLWQNFCVTHTYEPGSVQKPFTVACGLDTGTLTTDMTFLCDGYEMFGSEKVSCVNRSGHGIETLEKALMDSCNDALMQMSYKIGAENFLYYQSVFGFGQKTGVDLPGEANTSTLMYTLDNIKPVDLATNVFGQNYNCTMIEMVSAFSSLVNGGNYYQPHVVKKIADDNGNTVKTIEPTLLKKTVSENTSATLKNYLQNVVANGTGKVAKVDGYSMGGKTGTAQMYDETTHLRKRGCYLVSFIGCVPAQDPQLVIYTVIDQPNVQDQPHSNYAQNLTREILKEVLPYMNIYPDEEQTGVNADLTITGANPPTGEKVTQEGEQGEMNKTTYYINGNAVRELDEAAPVRRPQKSTRELEEIRRKKNRRKSARRNQERALSMNRAFVAFLTACVAASALVSVSLIQIRSNVTQQMNEVAALESRINDMKADNDARYKQITTSVDLNAIKDAAINRLGMKYASQDQIVYYSIDKNNYMDQYNDIPEMEFKHYSVLRDETIENLNIRPDGIYVDGTLGGAGHSYEIAKRLSDKGRLIGIDQDADAIKAAGERLAEFGDRVTIVRSNYSDMKNVLHSLGIEKVDGIMLDLGVSSFQLDTPKRGFTYRSEDAPLDMRMDDRNALTARDIVNTYSENDLYRIIRDYGEDKFAKNIAKHIVAARQKQEITTTGELNEIIKAAIPKKVRATGGHPSKRTYQAIRIELNHELDVLRDNLDDMIDLLNPGGRICIITFHSLEDRIVKSNFKKNENPCTCPPSFPVCVCGNKSKGTVITRKPILPSEKELEENSRSKSAKLRVFEKNELMFMGEYNHSIDAKGRMIVPAKFREQLGNEFVVTKGLDGCLFVYSNEEWHRIEENLRDKPLTSREARKFMRFFFAGAATCEVDKQGRILLPANLREYAGIDKEVVSVGVYSRVEIWSKDRYLENSDFDDMDEIADHMAELGIGIMDYNINFPHLHIYLQHVIKSISIGSFDIAMYGIIIACGMLAGLGVACYVAKKSGQNPDTYFDLALVAIICSVIGARIYYVVFRWDLYKDDLLSIFNIRQGGLAIYGGVIAAIITTFVFAKIRKLSFPLLCDTAGLGLILGQAIGRWGNFCNREAFGDYYDGLFAMQLPVSAVRTSDLTEKLMSHTTVVDGVEYISVHPTFLYESFWNLCLFILLMLYFKHRRFDGEVFLLYLLGYGVGRFWIESLRTDQLLIPHINYPVSMALAATLVAVSAIWIGIVRYKQRKMGKMVDTPPQSTTKDMTRLDCNVEKCAYNADNCCKLREIDVKGTKAKKACDTQCGSFSNKACDCEVSAELAIHKETDVHCDAAKCKYNDHNSCMANQIGIKKNCTPNKCSTECASFECQAMKITLKDGSSKEYSEAKSVYEIAKDISEGLARAACAGEVDGEIVDLRTVLDKDCTLNIITASDEEGLRVIRHTASHVLAQAVKNLFPDAKITIGPAIDDGFYYDFDSQPFSREDLDALEAEMKKIIKQGHEITRFTLPREEAIKFMKEKDEPYKVELIEELPEGEEISFYDQGGFVDLCAGPHLMSTKGVKAFKLTSSSMAYWRGDSNKARLHRIYGTAYNKKEDLKAHLERMEEAKKRDHNKLGREMELFTTVDVIGQGLPLMMPKGTKMIMKLQRWIEDLEDKEWGYVRTKTPLMAKSDLYKISGHWDHYLDGMFVLGDPEKDGEEEVMALRPMTCPFQYYVYKAKQHSYRDLPYRMGETSTLFRNEDSGEMHGLTRVRQFTISEGHNVIRPDQCEEELKACFNLNRYVLKVLGLENDVTYRLSKWDPKNTEKYLGDDEYWNSTQEVLRNILIEENVPFVEADGEAAFYGPKIDIQAKNVYGKEDTMVTIQLDCAIAENFDLYYIDQNGDKIRPYIIHRTSLGCYERTLAWLIEHYAGKFPTWLCPEQVRVLPISEKYADYAKKVADELKRNDVDVTVDNRAEKIGYKIREARMDKLPYMLVVGADEEADGTVSVRSRFEGNEGVKPLSDFIDQICKEIRTKEIRVELPEEEKHRMSVSDRNSFDYNGVTGLYWSHSKLVFGISSTGELSPLFGLMALLEEWHKIAYNDKADQGELQRFWQHYFLLEKGVYEKLLANPDEAVEGTVKELAEKYELSIMEMTGFLDGINDSLVTPNPIEEMDEDTKVSLVFDKEKLYKNMVDAKADWLYNLPAWDEIFDAETKHALYLEQKKSGTVVVGKKIGRNDPCPCGSGKKYKKCCGKNAMKKTKRILALIGAILLLLLYVVAFVATMLDHTSDMRYWKAAVAATIIIPVLIWAYSFVYRLIKGSDDKESDDVTKKPMKCKITPELSSKDWKEFCSRFHFDNDKLPLIRAIYTAMLPLVDAFAYYSIKQDLPGVSLAHYAYGLVTLGNGVDELSELYLNHEQLEEAYIADCLSLMLLSNAYEQFAKAVEEESSLYAIELSFLGDEYPLELLPEIFEHVSPDGIHLTGSNMLMPLKTAALIIKLDSQKQKNIKELCNTCANCKNLSCPSRKAPGPKLPHTYGAMQIFNIRHMNSMNQMNKDSNSINITGLTDEEVRQRVEEGLTNRADISTDKTTKEIVISNVFTYFNLIFLVITILLIMVGSFRNLTFLPIIIGNTVIGIVQEIRAKKTLEKMSLLNAPHADVIRNGSVKQISTEKLVKDDVILLTAGKQICADAVVISGNIQVNESLLTGEADEVEKTEGSTLMSGSFVVSGECYARLEKVGNESYISRLSLEAKSMGDKEQSEMIRSINLIVKWVGIVIIPIGLILFWQSHFVNGESITKSVTSTVAAIIGMIPEGLYLLTTVALALSTMKLARKKVLLHDMKSIETLARVDVLCVDKTGTITEPDMKLKEIFLCKNSGADGTQTALTLDELKSLILDYANASVDNNATMLALKAYAAEALTNNTSALHRTAVSQQAFSSSLKYGSVTFSDGTYLLGAPEFIMHEDFARIEEEIIPYADKGDRVLLFARYNGENVENGINGSVTPLGFVALANPIRANAVKTFEYFKSQGVAIKVISGDNPRTVSRIAIQAGIESAESFVDAATLDTEDKIADAVNKYTVFGRVTPKQKKQLVKALQAKGHTVAMTGDGVNDILAMKDADCSVAMASGSEAAAQAAQVVLLDSDFAHMPDVVYEGRRVVNNIQRSASLFLVKNIFSLLLSLFSVILMVTYPLEPAQVSLISMFTIGVPGFLLALEQNKDRIKGHFITNVMLKALPGGLTDVIAVGALVVCGEVFCISDASIGTIATLVLSVVGFMILFKISEPLNGMKYAVIIGNIAGLVFSGFFLKKLFALTDLSNICILLMIVFGFAAESLFRNLTLLVEKLRGSYEKKKGFNVMNKQKRTFVILAIVLAASLAGYLGLLNYNKYKSDDDSESESDSVEALSLDSSDVKSLSFLIDGQEYTFSRIKSDGTSDETESTESEKTDTESESFDSDDDEQWVCDNDTSLKINTSKVTSLLGNATSITASKKFDSDADTSDFGLDEPQNVVKLNTADKTYTITIGEKNAMLGEYYIKVNDDVYLSSTTILGTIPDSIDDMIATEDSESTETESEMLAIFKREFKSYFQNVIGWLFVAALLAVYGLYFYVYNLKNGYPYISYDLKGIGFIMMIAVPILTMRSLSDEKKTKTDQLMLTSPVSVGRIVAGKYLAMAAVYTIDIALFALSPLVLSIYGKVALSEAYVALFGYWLYGLSCIAVGLFISSISESVIISAILTFAALFLSYMMQSITGLISSSGNLLTKVLNCFDLYTPFENFVSGCFSVTSAAYYVTVTLLLCFLTTQSIQKRRWAFSKKMIGTGAFSAGMIVIMCAICVVVNLVVTALPAKYTSIDCSATKLYSLTNDTKDRVSKLDEDITIYVLNSKKSKDAKIDETINRYKDLSSHIKVKYVDPATSPKFYQDYTDTTPTTNSLIIESKNRSKVIDYNDIYEYDSSSYYYGYQSQSSITGYDAEGQITSAIEYVTMDADELPVIYQITGHNETEIGSNFQSVVSKANANLKSLELFNEEKVPEDATAIIINSPTVDFNEEDAQKVIDYLNGGGKAMIIGCYAYNDELTNFNKILAAYNVSFKTGVVAENDSSKYYQNPLYLLPTVETTDYTSDATDGYVFLAGSCAISYPEDTDDVTYTKLLSTSDSAVLKKDWKNITTSKAEDSDENGPFTTGLAVNDSSTGASIVVFGTPYVVDDSYDNAVSGNNADMFKDVISSLTGNVELASSVIPVKDYNLSNITINTLQAVITGLIIMIAVPILLIIIGIVVWAMRRKKMIEISNLVKKYGDHMAVDHLSLTVEPGKIYGLLGPNGAGKSTTMNIVTGYIGADGGTVKINGYDIFAQPEEAKKCIGYLPEIPPLYVDMTVYEYLKFVAELKKLDRKKRKEMIADAMDMTGITEVKNRLIKNLSKGYRQRVGFAQALLGYPEIIILDEPTVGLDPKQIIEIRELIKKLGENHTVILSSHILSEISAVCDHVFIISKGKLVASDATENLINLMSKNQEINLVLKSDEIGARGMLEKIVNIDKVTFEQSEEENTVKAMVIAKANCDIREEIFELASAMHMPILEMHTVVKSLEDVFLELTGEGDEKMSKVDVVIGCFYGDEGKGKVIDYLAADADVAVRCTGGDNAGHTIKANGVKYAMHLIPSGLLSGHTIGVIGNGVVLNPQVLLEEINNLKEHGYDVDKYLKISEKTHVIFPYHSKLDVALEKVRQAKKIGTTGKGIGPSYCDKYERSGIRMEDLYAPDFKERLKEQTELKLALLKVYDPETDYTKELDFDKMFAEYSDYAAQLEPYVCDTITLLHKALEDDKKVVVEGAQATLLDIDFGSYPYVTSSNPTIGGILTGTGLSASDIGNVYGVIKAYSSRVGEGPYVTELLDATGDKIRELGHEYGTTTGRPRRCGWLDLVTLKYAKRLNGLTALSVNHLDTIGKFDTIKVCIGYDVNGEVTEDFTTNLKVLNNAKPVYEELKGGWGDEIASCKTFEELPENAQKYISFIEKYIGVPVKFIGTGAEREAMIVRADNMSKVIVVTDSNSGITPDEAKKLGVEVIPMPFYIEEQMYYENIDLTQEQFYEKLTAGGDIKTSMPLVGDVTDKWDEFLKENDEIVYIPMSSGLSSSCETAYMLSQDYDGKVQVVNNQRISVTMRQSVIDAKNLAEAGKNAAEIKQILEDAKFESSIYIMVDTLNYLKKGGRITPAAAALGTLLKLKPVLQIQGEKLDAFAKARTVKQAKSIMIDAMKSDFEKRFNNPDGSQINLEMAYTHDIAAAETFKEEVQAAFPNNEIVMNPLSLSVSCHIGPGALAIACSKKIEYCNKMAKEIKYGSEARAALGAGVDKLANTVRVTLGPKGRNVVLDKSYGAPLITNDGVTIAKEIELEDAFENMGAQLVKEVATKTNDVAGDGTTTATVLTQAMVQEGMKNLEAGANPIVLRRGMKRATDKAVEALKNMSQKVKGKEQIAKVAAISAGDEEVGNLVADAMEKVTNDGVITIEESKTMQTELDLVEGMQFDRGYLSAYMCTDMDKMEAVLDDPYILITDKKISNIQDILPLLEKIVQAGARLLIIAEDVEGEALTTLIVNKLRGTFNVVAVKAPGYGDRRKAMLEDIAILTGGQVISSDLGLELKDTTIDMLGRAKSVKVQKENTVIVDGAGDKDAIAGRVSQIRGQIDETTSEFDKEKLQERLAKMAGGVAVIRVGAATETEMKEAKLRMEDALNATRAAVEEGIIAGGGSAYIHASKKVAEFVDTLEGDEKTGAKVILKALEAPLYYIAANAGLEGAVIINKVKESAPGTGFNAATEEYVDMVDNGILDPVKVTRSALQNATSVASTLLTTESAVATIKEDTPAMPAGAGAGMGMMMKLVPLSDRVVLKQLKAEETTKSGIILTSSAQEKPQEAEVIAVGPGGMVDGKEVKMQVTVGQKVIYSKYAGTEVKLDGEEYIIVRQNDILAVVEMSKTVFFDIDGTIWDDDMVIPESTIEAVATLKANGHLAFICTGRARASVRSEKLLNMGFDGIIAACGNYIEMDGKVIYENNLSADMVQKVIRVLSECKMPVVLEGSTDYWIDDEGFEDDPYVDYLFESLGEHAHIIRGYDGEIRINKFSADVIDGTDYERVKAEFADDFLILEHVENVVEFVPKGTSKATGIKWLCNHLDIPLDETYAIGDSVNDLEMLESVGHGIAMGNSMPPAKEIAEYVTSDISDDGVKNALKHYGLIMGKPTGFMEYDRCEAASVEPKERIKNFNEFHVFLSKENQQKQAARCMDCGVPFCQSGMTIAGMTSGCPLHNLVPEWNDLVYTGNWEQAYNRLHKTNNFPEFTSRVCPALCEKACTCGHWGSPVSVRDNEHGVIETAYANGYAAPKPPKVRTGKKVAIIGSGPSGLAAADQLNQRGHEVTVYEREDRVGGLLMYGIPNMKLDKSIIDRKVNIMKEEGIHFVTGCDVGKDIKPAELYKKYDRVILCCGAKNPRDIKADGRDAKGIYFAVDYLTQNTKSLLNSNLTDGKFVSAKGKNVVIIGGGDTGNDCVGTAIRQGAKSVTQLEMMPCPPIERAANNPWPQWPKVLKTDYGQEEAIAVFGHDPRIYKTTVKEFHKDKNGNLKELTIVSLESKKDEKTGRFMMVPVEGSEKKLPAELVLIAAGFLGTESYVAKAFGVELNARTNVSTQEGHYATNVKNVYVAGDNHRGQSLVVWAIREGREVAREVDESLMGYSYLSVQMSKQWNESTATAKGLYDPRYEHDNCGIGAVVNIKGIKTHETVENALKIVENLKHRAGKDADGKTGDGVGILLQISHKFFKKVTKPLGIDLGDERDYGVGMFFFPNDEFKTIQAKKMLEVIVEKEGLEFLGWREVPTEPDKLSKKARDCMPCIMQCFVKRPEDVERGLEFDRKLYVARRVFEQSNDNTYVVSFSSRTIVYKGMFLVEQLRQFFMDLQDPDYESAIATVHSRFSTNTNPSWERSHPNRFIVHNGEINTILGNSDKMSAREENMESPKLKKEFQKVLPVINAAGSDSAMLDNALEFLVMSGMELPLAVMIMIPEPWANNSIMTQKKKDFYQYYATMMEPWDGPASIVFSDGDLVGAVLDRNGLRPSRYYVTDDDYLILSSEVGVLEIDPTKIVKKDRLRPGKMLLVDTVAGKIIDDDELKERYADKQPYGEWIDRYMVNLKDLKIPNQRVPEYTKEERQRMQRAFGYTYESLKDSILPMAKNGVEGTAAMGTDTPLAALSGNREPLFNYFKQRFAQVTNPPIDSIREEVVTSTTLYIGEAGNVLEEKPENCRVLKINNPILTNTDLMKIKNLKADGFKVEVLPIIYYKNTSLEKAVDRLYIEADRAYRDGANIIILSDRGVDENHVAIPSLLAVAALQQYLVKTKKRTSLSLILESGEPREVHHFATLLGFGASAINPYLAQDTVKQLVDEHMLDKDYYAAIDDYNHAIITGIVKIAAKMGISTIQSYQGSKIFEAIGIDKSVIDKYFTNTVSRIGGITLQDIENDVNELHSAAYDPLGLETDVTLDSKGRHKMRSGADDHLYNPATIHLLQQSTQRGDYNLFKQYTALVDEEEKNTNIRGLMDFNYPKKGVKLEEVESVDSIVTRFKTGAMSYGSISKEAHETLAIAMNHLHGKSNTGEGGEDKDRLTIGKDGKNRCSAIKQVASGRFGVTSRYLTSAQEIQIKMAQGAKPGEGGHLPGKKVYPWIAKTRLSTPGVALISPPPHHDIYSIEDLEQLIFDLKNANRDARISVKLVSEAGVGTVAAGVAKAGAQVVLISGYDGGTGAAPSSSIHNAGLPWELGLAETHQTLLMNGLRNKVRIETDGKLMSGRDVAIAACLGAEEFGFATAPLVTMGCVMMRVCNLDTCPAGIATQNPELRKRFAGKPEYVENFMRFIAEELREYMAKLGVKTVDELVGRGDLLKKRDNLSERQSKIDLDCILNNPFDGKKQSVIFDPKQVYDFELSKTKDMTEIMTQLKSALESGQKRAIEIEVTNTNRSLGTIFGSEITKKYDDTLDEDTFVIKCNGAGGQSFGAFIPKGLTLELVGDSNDYFGKGLSGGKLIVYPPAGVKFEKDDNIIIGNVALYGATSGKAFINGVAGERFCVRNSGATAVVEGVGDHGCEYMTGGRVVILGKTGKNFAAGMSGGIAYVLDEDNDLYMRTNKQMVFTEEVSNKYDVLELKEMIKEHVTLTNSEKGKEILDHFSEYLPKFKKVIPYDYNRMQMAIVQMEEKGLNAEQAQIEAFYASTRGMNKNLKLRAIVWEIIVPIVLYYIVFLSAMYFIFAFIGHTASTYMIAQIISAAITIPFMYFASYKPTQQMFVKKPKIDRALFINVIWVIVITLFISFALNNIITMSPLIGLSEGYARANESFYASTLVIELIGSAILSPIMEELVFRGIVFGNMRKIMNVPQAVFLSALLFGLIHFNIVQFVYAFLLGLVLAAFMYKSGHVYAAMIGHITANAFAVIRTETGILKCTVDGSVMAWVVSVMCLGVGAVIFYYYAKHTEGTVMKAILFDLDGTLIDSSEGITKSAQYALSHFGIDEPDRNSLFFFIGPPLIITFMEHYGFTKERALEAVEKYRERYNKIGIFECSLFPGVKECIEALKAAGYRIGLASSKPEKSCERILEHFGILDMFDEVVGATFDGRIDTKEEVLNEVMRRWSDIPRDEMCLIGDTMFDIEGANRVDVPSIAVSFGFGDVNEMVSAGAKAVIDDIRQLPDVLSRLFDMEEQDIKEAKRARNFIWMAACDYDIEPLFLAFAPDGSADIYLNLIIGLEYKWYEHDKIDALFNQLTGKNAMLYEGLLWIGLENALYEKERQTRPALYDLRLEYAKKSLAGVNKNREYSRIDIIRNAHCRRILGKPSGLCKEDEEILHAFCFTPDMTTDEIIVKTRENLWKYFSYKPIKVVKPQGIYFLQKVAGAFHSIGKVSTQYVRANSFYDKNMASDTAALSMEHSKRYLLQFALQKDPIEAKRYVTACFGKSMYSDRQQAELEKKLCVGNHKNCHLLFTRGISSEKKQTVPDEIDNKRERREILAFKKETAMQYDKNKEHFEKNMAVYQNSIRRLTESLRMHLETADETFMDASTHGRIKPARVWKALYLDNPRVFERKDEVETPGFSVDILMDASSSRKQMQQKIAAQAYVLSKSLTNCGIPVQIYSYCSIRGYTVMHIFKEYDDYGVEDELFHFVAAGNNRDGLALRAASHLMELSPKPKKLLFMFSDASPQDDQIAGEGAFYKDREYTDALAVKDTVNEVQRLKNHGIDVIGIFMGSAHDSEIATKIFGRSLVKIKSINEFADAVGRVLNEILTMSLLDKLRELGISENLIKEIEKFRSQYPVDNEYESRIPVPTQFYYGSDVWEQAITAVLCGENLLLVGEKATGKNLFAENLAGVFNRPRWDVSFHVNMDAASLIGTDTFRAGEVTFRPGPVYTAAKTGGFAVLDEINMAKSEAMAVLHATLDFRRTIDVPGYDRLSLHPATRFIATMNYGYAGTKELNEALVSRFAVIRMPMISKESLVKLIKEHYPAIREAGANELAEVFLELHTKCKNGEISSKALDLRGLIGSIGMMEKGLNIYTALDMGITNKSFDEYEQTLIRDTIRARISRKMSGEQLFCMDRNIDNNVDNNIIQTEYSELMQKSYIDYAMSVIIARALPDVRDGLKPVQRRTLYDMHELGIRYDKPYRKSARIVGDTMGKYHPHGDSSIYDAMVVLAQDFKKGMPLIDGHGNFGSIEGDGAAAMRYTEARLQKITQEAYLADLDKNVVDFIPNYDETEKEPEVLPVKVPNLLINGAEGIAVGMATSIPPHNFGEVVDGVIAYMKNPDITTAEMMQYIKGPDFPTGGIVANQDDLAAIYETGQGKIKIRGRIEIEKGKAGKDKLVITEIPYTMIGANIGKFLNDVYSLVESKATTDIVDITNQSSKEGIRIVLELKKGADVEALKNLLYKKTKLEDTYGVNMLAVANGRPETLGLVPIIRHHVNFQYEIAKRKYKTLLAKEQEKEEIQQGLIKACNVIDLIIEILRGSRDQKMAKACLINGETEGIKFKSKASEAMAAQLCFTERQAAAILEMRLYKLIGLEIEALIKEHEETRAKIAEYSDILEHRSSMAKVIMKELKAFRKEYARDRRTELDNLEEAVVVKKELEVSDVVLLMDRFGYVKTVDTSTYDRNKETADAENKLILKVKNIDKLCIFTNNGNMHLVKVLDLPYGKFRDKGTPIDNVSNYDSSKEDIVFIAPLMDVEKHKLIFGTKSAMIKLVDGAEFVVTRRTSQATKLMDDDELLFVDMLSENATMVMRSKKEMFLRIDCGTIPEKKKAAVGVRGMRLDREDELTDIYLLNDQEEKEVEVKGKQVALHRLHIANRDTKGVKKMAKKQTYDEKSIAILEGLEAVRKRPGMYIGSVTTKGLNHLIYEIVDNSVDEHLAGACDTIRVTLEKNGSCTVEDNGRGIPVGMHAKGVSAARVVFSTLHAGGKFDNSVYKTSGGLHGVGSSVVNALSTYMDVEISRDGFIHHDRYEKGVPVVELENGLLPTIGKTKKTGTRINFLPDPEIFEKTRFKEEDVKNRLKETAYLNPKLTIIYEDKRGDETEHIEYHEPEGIIGFVKDLNKNIEKLHDVIYFTGESENIKVEVAFQYTSEFHENILGFCNNIYNSEGGAHITGFKTAFTGIINSYARELGILKDKDANFNGADVRNGMTAVVSVKHPDPRFEGQTKTKLDNQDANRATAKVTNDEVPLYFDKNLEVLKTVISCAEKAAKIRKAEEKAKTNLLTKQKFSFDSNGKLANCESRDASKCEIFIVEGDSAGGSAKMARNRMFQAIMPIRGKILNVEKASIDKVLANAEIKTMINAFGCGFSEGYGNDFDITKLRYDKIIIMADADVDGAHISTLLLTLFFRFMPELILEGHVYVAMPPLYKAIPSKGEEKYLYDDAELDKYRKTHTGKFTLQRYKGLGEMDADQLWDTTLNPATRMLKRIEIEDGRLANDVTSLLMGSDVPPRKEFIYEHAHDAELDVMITNQKLKKSLEEIKNITSFDAILYSAKGKHLTGTVEEPEHSDIFVKEFIVSEEDVREKNDAIAFAVEIDSELEYVLVMFCQYTSENLVIGRMAVCQLRTLVLGESERYDRNNFIQNILLGNMLGSDIINRAKKLHIENRKRVVYVIDTGKNCNEIAVELVKNLADIRSGDFVVAMDEHNVVLVKDVEDIDPAKLQEKLSSIAGSLVDNLLAEAMIKVRVGYGNPTDVLPKLAESYQEAKMALEVGRLFYVEKEIMAYDRLGIGRLIYQLPMSLCEMFIREVFGDEVPQILDDEEAMSTISKFFENNLNISETARQLYVHRNTLVYRLERIEKAIGLDIRTFDDAMIFKIATMVLAHIKDSRQGRMASLSLKNVCKVYPNGFEAVKDFNLEVEDKEFIIFVGPSGCGKSTTLRMIAGLEEISSGELIIDGKVMNDVEPKDRDIAMVFQNYALYPHMTVFDNMAFGLKLRKVPKDEIKAKVEEAARILDLEKLLDRKPKALSGGQRQRVAMGRAIVRNPKVFLMDEPLSNLDAKLRVQMRSEISSLHNRLGATIIYVTHDQTEAMTLGTRIVVLKDGVIMQVDSPQKLYNQPNNLFVAGFIGSPQMNFVDAQCVVEGAKVFLKFDKYQVELPEAKAKKLIDGGYAGKNVVFGIRPEDIYDSAEHLNKFATCKIDSDVTGYELLGAEVLLYFTVAGANMSARVDSDTTARYGDHIELAFDPHKIHVFDKETELTITNMENRIVKFKSKESAGLNLHAIPGHFATSHSHINYYVDVTSIKTRVSEAKEAAKALYTKVPHHSYIDTIVCMDGTEMIGAFLSQEIERNGLMSVNKHETIYVVSPEINNGQMLFRDNNKGAIDGKHVVLLLATTTTGETIRRAMECINYYGGMVTCIASIFSTIDEVNGVKIDKLFDDDDVVNYQTYPVTECPFCKKGLPIEAMVNGFGYSKLMKINIKKLTTTAKIPTRGSEYAAGYDLYADITKDLVIEPHETAKIGTGLSIEIPDGYFGAVFARSGLAAKQALRPANCVGVCDSDYRGEYIVALHNDGTQARTINPGDRIAQLVVMPYLAVEFNEVSELSDTKRGAGGFGSTGANMSRVGIIGAGSWGTALSLVLANNGHSVEIWSIVESEIEMLKEKHEHIDKLPGVKLPDSITFTTDIEETIKNNDILVLAVPSVFTRSTAVKMAPFVKEGQIIVCVAKGIEENTLMTISDVVESEIPCADVAVMCGPSHAEEVGQLLPTTVVAGARTQKTAEIVQDLFMNEVFRVYTSPDVLGMELGGSLKNVIALAAGMADGLGYGDNTKAALITRGIAEISVLAIEMGAKAETLFGLTGIGDLIVTCESRHSRNRKAGMLIGQGYTMDEATKEVKMVVEGIYSAKAALALAEKYDVRMPIIEEVNRVLFEDKPAKEAVSELMLRDRKIEHSSLEWKMILARILALVVGYFFGTFQTGYFYGKAHGIDVREHGSGNSGTTNTLRTLGWKAGAVTFFGDLFKAIIAVLIFYFIYRNTYPQAVKCIELYAGFGAVLGHNFPFFLNFKGGKGIACTSGVILAVCPIAAPICLVLFILAVAITRYVSLGSILVVISFLIQAIVFNHMGLLGVSGNYAVEFDILAACFTAMAIWRHRANIKRLLSGTENKFGQKAKMSRPVVAIVGRPNVGKSTLFNALAGERISIVKDTPGVTRDRIYADVSWLDYNFTMIDTGGIEPESGDVILSQMREQAQIAIDTADVIIFITDVKQGLVDSDSKVADMLRRSHKPVVLVVNKVDSFEKYMTDVYEFYNLGIGDPHPISAASMLGLGDMLDEVVKHFPDSSKQDDEDDRPRVAIVGKPNVGKSSLINKLAREDRVIVSDIAGTTRDAIDTAIKYDGKEYIFIDTAGLRRKNKIKEDIERYSIIRAVSAVERADVVIVVIDATEGVTEQDAKIAGIAHERGKGIIIAVNKWDAIEKDNNTVKQHTEKIRQILSFIPYAEILFISAKSGQRLNKIFELIDVVIENNSMRVATGVLNEIVTEAVAMQQPPTDKGKRLKIYYVTQVSVKPPTFVIFVNDKNLMHFSYTRYLENRIRDTFGFRGTALKFITRERKENEMKSKTSFINKTMLQKNVKLYWPIWTLYTIVLLLNGPFSMWSRFKSAEFIYGTNWHKYMLDIMSPAISMEADMIFIFVMALVTGMAMFSYLYNSRACNMIHAMPVTRRQLFSTNVLTGLLFMWIPQIVKYIMSFVICISYGNTKVVHIGINLLATMGISFFMYSLVCLCAMITGQLVSVAVMYAVVNLLYGGAVIAIANVLTYVSYGLPYMEFVKKISVTWFAPMLQLLNRIGFHPTMKKAGDDYYCIKYTFRGTNTIVVYVIAAAVIYFISYKIYKHRDLENAGSFIAIPKLKPVFRWGLGSLGGLILSIVAASLLLGLRISIGVPAIMMLAVVLGIIAFLLLEMIIRKNFKIFSKALFKEIIAFGAFVVVVFGGITVYGNVQENYIPKLADIDSACIAIDFDINLEGKDVEKILETQKILMAQKKDYFKKRYDDSGYITISYTLKNGEKVNRVYHITDDFNPHKQCKAIMAEENKPQNIINAIMQCDTTDITFINGSAEQYNDKYVDVLNERFNGKVAADIFDAVKKDVEAGVMQEYNLQRMLDGVDKDTSYMYNLMLNFTVPKGNRIGKSWNVDGFTWYEELLDILGVTKEYSDFGDARSDGIETYSVNIRFGENCTNLIAVLKENGLISSKEPLLTYEMIQINNLVKKFDDFKALDGVNMNVEKGAVYGLVGPNGAGKSTLIRHITGVMRQDAGEVFIEGEPVYENARIKGHMAYIPDDMFYFLQSDTINMMHYYKGMYPNFDEKQFYRMQEFFPSIDVKRNIRKLSKGMQKQVAFWLALCCKPKLIVLDEPVDGLDPVMRRQIWSIMLDDVAANNTTVVVSSHNLRELEDVCDHVGILNKGKIMIERSLTELQGNISKIQIACPYGMPKIPQDFKVLHMSNIGRVYTVIVRGEPEAVVKAITDGKDSPQVVDVLPLTLEEIFIYEMGGEDYEVKDIIYMQLNYRDSKPIYEQIKEGIRRMIVMNVIKQDEKLPSVRVLACKYAINPNTIAKAYKELEEEGYLYTKSGKGTFVADAKTARQSLTRSLKILFDQVVTELFVLETPVEELRTRMDDAKEQLSMEDDLVRFVTQDMQTEDVVTEGNDDTDKMPKAIYVKIGVSRWIVHCAGTDAARQFFWFFELIMKTDIDKNIKKDKNIKKDKNMQAENIHKNVDEITINDFVTKNDKDVLGLKKHVLSSGSVVPLLHFRKLNELSMIEHCFTTRLGGLSEGMFESLNLSFTRGDDEEKVLENYKRVAEAIGAEAGQIVTTDQTHTTNVLRVGKKQCGIGVTRKRPYTDVDGLITNEPNVVLATFYADCVPLYFVDPVHRAIGLSHSGWRGTVNRMGKQTLIAMNREFGTEAHDVIAAIGPSICQDCYEISQDVAECFVDEFATTDDPHASDILLYKGDGKYQLNLWECNRRVLVEAGVQEDNIAISNICTCCNPSLLFSHRASHGKRGNLGAFMFLKMICEAVMNKRSVGSIYEQLAAEQLINMGYSVLVCNYRNRFGEIDIIAKDGDTICFCEVKYRRDNGCGRALEAVGYSKQKKIISVARYYLMTHGLNEWTPCRFDVIAVDDDEVTVLKNAFEGSQMIQFIYVYLNIAILYQGDAMQISNLVSQYNNSVTNGEQILARMDNIILRCDNNINGIFTAIYDAFVYKNQMQKENHGVYRDNISIEIGIGGNYTLFSKMIDIETDEVKVQKTILAIQKKLGFKIYETVFDALCHYSDNRATIVLGFLVRAFKVGQRIMEHMTDKYVMEVFELSRKVNKEADKIRGFIRFSDNGNYLLAHFEPKCDMIPVVMWHFVDRYPGENFVICDDRRRYAVVHPRLKECFYINESEFKQLERSVPVKTDSFEQLWKVYFEHTDIRERFNPQCQRNLCPKWYRKNMVEFTMLTSISADIMEKLKILSDAAKFDVACTSSGASRSGNGNDMGSAFASGICHSFTADGRCISLLKILFTNECIYDCKYCINRCTNDVERVTFTPEEVCNLTVEFYRRNYIEGLFLSSGIIESPEHTMQLLYTTLFLLRNKYHFNGYIHIKGIPGASSEVLEMIGYLCDRMSVNLELPTAEGLRAVAPNKARKNILTPMRFIQNGIKDSRMYHGNSSMKNRMYIDEQAYYEQMAEIKDSTARLSEYHRCLRVATDCGKADKLAEKSWGMGVQLDPGVVCETTDVSYGAGDYINNTGLSIKRPDRYYVPAGQSTQMIVGATGESDFQIISVAEAMYNRFDMKRVFYSAFVNVNMDESLPGIGQPPPLKREHRLYQADFLMRFYGFKAGELLSENNQNFNDYIDPKCQWAVGHLECFPVEIMTADYYTLLRVPGIGTNSVRRIIKARKHAKLSFTDLKKMGVVLKRALYFITCDGRMMYNTKLDESYITRHLIYNERPDTMLLADNKSCTYEQMSIFDFISGMKEKLMINITKPQYVQVSDITYAQVDSWYDHCRRDLKLDLIYPEDMSDKRYPCIVWICGGGWMRMDKSAHLSYLSTLAHQGFVVCSVEYRTSNEGCYPMQIEDVKAAIRYLKAHADRYRIDKEHFGAMGESAGGFLTCMAALDHDKARDVGEYLEESSSIQAACPWYPPTNLSTFKYKDAEECAASMESLLLGYNTMRNIKEAYNSSPVSKVTKDAPPFLIIHGINDQTVPFEQSEELYDKLIENGCDADLIALEGADHADLQFFQDELWDRIIEFFKTKLGILSQKNLDLLTEYWFKCGRPKDILFPSSWSGGYLDIASVNQFFKKSAKLAGINRHVSSHACRHSFASHLFESGTDIKYIQSLLGHVDPRSTDVYLHVSNKTLLMSKDCTIQDVFHRFYPSFESTHSISPAQRKAAYHIMNCKTGAFGVNVSVCEDCGCISVHYNSCRDRCCPMCQEFPKEKWVDARREDILDAPYFHVVFTVPEELNPIIYSNQKFLYTALYHAASDTLSELAADSKYLGTDIGYICILHTWGSTMNFHPHIHAIVLGGGLDVKNHWKDNGKDFFLYIQSLLGHVDPRSTDVYLHVSNKTLLGIRSPFDNPEGGESGDWNSGDWNSGDWNSGNRNSGNRNSGNRNSGDWNKTNFSNGCFNTEEPKIFLFNKPSDWTYRDWLNSDARYLLNQIPRNVVDWIWSDDMTDEEKEQHPEYEVVGGYLKILDESECGQLWWDSLSERYKNIIKAMPNFDKEIFEDVTGIKIMISLFPHQQEALQETKDFDNIAVYHDMGLGKTFTGSEMMKRFGCKVNLIVCQKSKVQDWVEHFTDNYQMQVFDLTNKKQLGEYHGLSQGQRFFIVGVINYELAWRRKELLDLYNFTLMLDESSLIQNQKAKQTKFILKMKPAHVILLSGTPVGGKYENLWTQVHLLGWKISEDLYNRQYVNWTTIDSGGFQHKIVDREDPYKNIDRLKSKMREHGAIFKKTEECYELPEQVFTHIRLKAPKEYWKFQKDCIVTIEGQELVGDTSLTKLLYSRQICSQFNQNKLDAFRDLVESTQERLIVFYSFNDELWNMKKICQELDRPISEINGHTKDLTSYEQESNSVTLCQYQSASKGLNLQKCNRIIYFSLPLSSEDFEQSKKRIHRIGQEKTCFYYLMICRGTVDEQILHTLEERKDFTDELFKEDEKKNSMLVNFTWICLVLYANGWVTDTKPYYERLEKEGEYYDEMMMKCKVAMDDKNECTNCCYFCDKKDTCNDVCQDIAKVCEEQVEETDLQVIESTVPDVLKAITDITVQKKKLEEQEKVMKQKLLQAMEEHGVKSFENAKVKFMYVAPTTRTSIDSKKLKADHPDIAEAYSKTFNVSASVRITVKMASEKNFENRIKSFLKSNNCYFIKYWGGGEFTKAGVPDILACCNGRFLGIEVKAQNGKPSPLQIHNLKKIDEAGGFGILLYPDHFELFKNFIDCLKVDDANTAYNYDLLKRRWSDGMDNFHFSTAECFENCPARFGFRYRQNIEVLPTDDPANPLILGTAIHRGMEKDMETAIQEYKDSYPIITDAHINEIIKLEYWIPKMKELLPEGFHEVNFKNDVYEGTADLIVPCTKHDAGLPHGQFDLYDFKYSNNIDHYMESRQLHVYKYFFERITGKHIRKMYFVFVPKVQIRQKKTETLQDFRNRIYEELEAKEIQIKEVVYDPSKVADFYETCMNIGLTDKCEKNESYLCDWCEYKDYCQKGLDYMILPSAERRQVGKTTKRKLWIYGGAFSGKTTFMDSAPSPLNLNTDGNIQFVTMQYLPIKDTMEGRQKILAWDVFKKAIDELEKTAGQNGFKTIIVDLLEDTYESCRLFMYDRLGITHESDDSFRAWDKVRTEFLSTIRRLMNLDYENIVLISHEDTSKDITKKSGDKITAIKPNIADKVANKIAGMVDIVARVVVEDDETRTLNFKSNEVIFGGGRLKNIKTTSIPLDWDELLKVYDEANFFAKPAEEIQEDAKETAEETPRKGRKSRTQSEPVKESSEEPMQDGTTNTDSETVVLDADTYFHDIKNDNYLMKHAGDSVDLVVDGETVMEVITKEEFGEGIKKLSGAGEEKPARKRRTRKERMKKFIEALKEAGIYDHIVETIVDVRNRYGAKDATKGITMILKTEMIKNPKLLDVFMDDTEDLGFKTVCAEIMKSVVDVEKVDAMKDVNPDELFKKATEHGDSGLKKSNEEALEDAVVGSFIDFLNGIANMLNDMSIFDKWDKNVDTEGLQKDIAEAEANGGQGDYREVPVGTYEVKIDKMEIKECGSEKHAGEPMFTVQFRILEGDFENSCLFMNQLITEGWQIGQVNKFLRSLDVNDTVEFKTYGQYNDMIMDMMESIDGSLEFLLEYGKNKKGYNTFKIKEVYEVMLFFDFEVFIKDWLVVILDMDNRKEHVIINSPSDLKQFYQEHKTDIWVGFNNHHYDDYILKGILCDMNPKEINDHIIIKEKAGWTFSNLFRSIPLLSYDVFQAKIDRGLKFFEGSLGNMVKESSIPFDIPRKLTEEELQETVKYCRHDVEQTVEVFMQRKADFDAIMSLIKMFPEVLSIRDIGLTKAQISAKILECEKVRRNDEFDLFVLPCIQIKKYRKAIDFYMSMVGKTNQKEVYSESLNMIIAGLEHNISWGGIHAGKEKYQNLGHGRQIWHVDVASFYPRLMIFHNLLTRNSKKPEKFKMIYNRRIELKHAGKKKEQAPLKIVINGTYGISKAINSLAYDPRNANLICLNGQLMLIDLIEHLEVIDGFELIQSNTDGLIVSLPDTDEAFEQMDDICFEWEKRCNMELEFDEISSIWEKDVNNYVFIFSNGKIERKGAYVKELSPLDYDLPIINKALVDRLVKGTPIEATINGCQDLKEFQMVKKISSKYDCIMHGGHWEKHKAINPATGRLKTFTRFVGNTKKLNEKCVRVFASVNESDGGLWKIKKDGSKAKVEGTPEHCFIFNDEVNGVKVPRQLNKQWYIDTAYDRLSGFGICEGRRMDWKGNSMVFKGYSTGTGKKATMKVKDAQLLSWDDVQGNQSFGAILNQDFIDISFDTDELSQKFWDMAEKNNWNCLILENPENGHIHSYWKDTEHRIEKGGKDKKLAVGLIADIHSGSTYIPLRVNGVDRFPPSFEPDDIDEVPDELIPVNTTINLADLQEGDGRNDELFKYILILQSQLMLDREPIRRVLDNINHFIFQDALSEEEMDVITRDDAFAKPIFYKGKTFLHNAFGQYMKNEYHIKRIQGQLHVYDGGIYKSGYRFIESKMVELIPTLKANHRVETLKYLEIITPEETQVADANLIAFRNGLYDLATDELLPFSPDHVITNMIPWDYNPEAYSELCDKTLNKISCQDDEIRALLEECIGYCFFRQNELSKSFFLTGSGSNGKSTFLDMVKNVLGRPNYVSLDMDELGERFSTTTMFGKLANIGDDISDEFLQGKVIAQFKKIVSGNDIKAENKGQDAYFFKPTVKLLFSANEIPRMRNKGFEAIKRRLVIIPFNAKFSKDDDDFDAGITWKLKKQDVAEYLIKLGIEGLKRVLTNQGFTESQKVKDEVDNFEKDNNPILLFLEEVEEDEILNHETKEVFARYDTFCNENGFTRIAMQTFTKEIKKHLGCDRKDVRLNGKKAIIFIKMELHEETDGQLSFAEDVVNHPSHYCQDGGMECIDEMIAIFGKTAVKHFCLLNVWKYRKRAVFKNGAEDMKKADWYMKKYVELGGKAVNCMNYHNITKDDMNNGDGLRVVLWVAGCSHHCKGCQNPVTWNPDDGIEFDIRAKKEIFKELKKKHIAGITFSGGDPLFSTNKGTVFCLCQEIKKKFPTKTIWIYTGYDWETIMNNKYMKAVMKYVDVLVDGEFIEELKDVNYPWAGSTNQRVIDVQKSLKEGKVILHESNMKVIKKDGTHEGYDFMKIKNAVTKSAKRVMIDLDDEAFDRLKDIVELRLSLLNTELIPIADMHNVVEESLEQFDPRIAKSYKDYRNYKKDFVHMMDKVYQKSQSIRFIGDKENANTDSTLVATKRCLIFNDLNKRLYRKFFMTQEELQACKDGYIYVHDQSARLDTMNCCLCDVGSVMKGGFEMGNIWYNEPKTLDTAFDVLGDIILSTASQQYGGFTVPEVDKILSPYAVKSFKKYVDEYYQMISAYSELDSDDVSKNANTYAMQKVKRDFEQGFQGIEMKLNTVGSSRGDYPFITMTFGLATDEFGKMASITFLEVHAKGQGKEGNKKPVLFPKLVFLYDENLHGEGCINEDVFEAGIECSSKTMYPDWLSLTGEGYVASMYKKYGRVVSPMGCRAFLSPWYEKGGMHPADESDKPVFVGRFNIGAVSLHLPMILAKSRQESKDFYEVLDYYLNMIRKIHQRTYDYLGEMKASTNPIQYCEGGFYGGHLKLTDKIKPLLKPMTASFGITALNELQELYNGKSLVEDGQFALDVLKYINDKVNEFKEEDGWLYAIYGTPAESLCGLQIEQFRKMYGVIENVSDRPYVSNSFHCHVTEDITPIQKQDLEGRFWDLCNGGKIQYVRYPIDYNKDAIRTLVRRAMDKGFYEGVNLSLAYCDDCGHQELEMDVCPVCGSTNLTKIDRMNGYLSYSRVHGDTRLNSAKMAEIKERKSMMKCDGCFGASFDDCKRCKKMTGKEYQKLAMRTCSIPYDNKEGRLHHAVFGLTSEAGEVAGILQKVYQGHEFDKEHIKKELGDCLWMIAEACEALDLDMDDVMQTNIDKLKARYPEGFSADRSLHRKEGDIMFLKLALIFIIWGIYGDLEKKNDETSSFCMVLLTFLILFSMLRCEILDVQGFNPAIHGMRNPKNSWDKSDSYDAVDCGKCGLIEEKGVCNKEDRLGRCDNFRCYAVGDNDLKLMKTLFNAGTEHRKYDRMIQVWMDIEAPLYWWKEFDTYKIGTVANSCSTMHKIHSRDLTLNDFSTEHLSKTNLIVVDMVIDAINNARQDFLQNHDKIDWWQMIQLLPSSYNQKRTVMMNYEVIARIIEQRSHHKLDEWHQLVDVLGGLPYMQELMKMILDDIRELKKDIDELKMKIDAFTTAGAIRYDKECVQTSPSGDSLEKMIIRLIEDKDNLEHLIKEYQYMCSKVNFALYTIRQQEFIRLYYFQAYSMKQCCHEMRTTYNNLCNIKKRIECMARKLTDKQKKFVEEYLIDLNATQACIRAGYKPENADKMGSELLGKTRVSEAIANAMAERSRRTGINQDRIVQELARIAFVKITDVVDSDGEINTNASDDDLACIESYKVEDSDSVNGSSSKREVKLASKIKALELLGKHVGMWNDKIQVDVSIPVFGGEDDLEEMINLNKKYYHLPDIVGKGYKKFWNFKGRYRVVKGSRASKKSKTTSLWYIYNLMKYPESNLLVIRKTFRTLKDSCYADLKWACHRFGVDHLWQFTLSPLEATYLPTGQKIYFRGLDDPLKVTSIAVDKGCLCWMWIEEAYEIMSEADFDMLDESIRGECPDGLWKQITLTFNPWNEHHWMKKRFFDNPDPDTLALTTNYLCNEWLDKADLQVFERMKKNNPRRYAVAGLGGWGIVDGLVYENWKEQAFTLDDVRNCKTRCGLDFGYTNDPSASPIMFLDLENKKLYVWDELYKTGLSNKKIYEELSSMGYGKEKFTGDSAEPKSIDELKSLGLRIKGAKKGKDSINNGIQWIQDLEIIVHPRCVNFLTEISNYTWDKDKFGNKLNRPIDDFNHLMDAMRYGLEDDIIGNAWLYMLKEDEILKFIQEDKVSTKKNLASIGQKYYDADHDIMHYRMFYFNADGKLVEDTTRSNVKISHPFFTELVDQAVQYMLSGENGIIHSDIPELQTRLDEYFDDDFICELNDVLTGTMAKGFEYMYAYMNKDGKLSFECADSLGVVEVREKDTDDGCAYVIYWYVDKLTKENKVIKRIQVWDENQTTFYVQEEEGKLILDESEPINPRPHVIYKKDGDESIYYENFGFIPFFRLDNNKKQWSGLKPIKDLIDDYDIMSCGLSNNLADFDYPLHVVKGFQGDNLDELQQNLKTKKMIGVDPEGGVEVHTIDIPYQARQAKMQEDEKNIYRFGMGFNSAQLGDGNVTNVVIKSRYALLDLKCNKLEIRMKQFLKKIVKVVIGEINRIDGTDYQVADVWFDFKREVMTNAQDNAQIELTDAQKQQIQINIILSLQGVLDDETIIQTICEILDIDYEDIKDKLPEDEEQDNQLAQSTLEGIVPEEGGEDIDEMNKTEKQIAKYQLQQEQKTLRELKQVYAQASKDLQKSINDLNLRTDMQNLQSIIYQVKYQEAMKKQIDGILDKLNKGSYQTINEYLQDAYHNGYIGNMYSLQKQGIPITVPIDQKKVLTALQTDSKLSSKYHSGNVLKGRLAEDVKKLKVTIRAELSRGIANGETWQQVAYKIALGMNNPMSKALNMAMRIARTEGHRVNQQGFLDAGTEAKKKGADIVKQWDATLDSVTRPWHQEADGQIREWDDFFEVGGEKMKAPSIGGSARNVCNCRCQLLQRAKWALDESELKTLQDRASFFGLDKSKSFEDFKKKYLKLPSNADTMKLKTLPKPTGSKDSHYDGFFKRLNQMNVDYNPVQNQIKKVTEEEIINLLAGGDRTSGSCASVGLAYIGQKQGWDILDFRGNKSQEFFSNGLNLNGLSKTEGIKTLKADGKCSLTVGNRLLKQVETGKEYYLCVGKHASIVRKTEEGKLQYLELQSAYNSGWTDFNGNPKSTLHDRFGCTSTSDYGTSSTYDFMIDIEESDFSTDDFKSLLGYINTSDSAQKKGKNGTIKMEQSNKWYKNNPDDKIWWLNNPEVKGEWVFSFDKKTEFNMFRDYPYALTSEQKKIFDEENPYWKNFFMDRTQMTLQELLKAQNLTDEQVKGILDAMKQNKIYTASEENLDVRYGKLKTDHDAMVAKDAESQKLIAELQKATKGQEDVQTKITEYEATIQKQQEELAEAKTESALKIGLLSAGAKATDIDYLIYKMNHDSDWKPELGEDGQVKGLDDKVKGLKTQFPSQFESTSTKKIEEKKLEKPEQKDTVTKEDFNKMGYQARNKLFNENPELYKELSSNMASITTKLSNIINPEVMSDMIEAKIEAQCKITPYAHVNTDLQGTAGDTITVPSWNYIGDAEDFDVEKASDTNAEVETTNLTAGSTTFTIKCAMKAVSILQTAINSGLGNPIGQATLQLAKSIVNKVDNDLIDAIYAKMTASKDKCITADEKANYVNYDGIVDAVTKFEDEEDGIEKVMFIHPKQEKALLTDADFISADKFEAGVAVNGSIGKIAGCWIKKSKKVKQEETTNCWLNPIIKLEPDSTETEYTEDELPALTIFLKKDTQVDHEWFPKKQKHDITASKYYGVAVTNASKLVVAKFKGDALTAMIISVDDIVSMPDFIGQDTKILQKKLNALELLIRKYTNNNFQNRSIRFIGNSLGDRIFGGHPFIRVGDTIQISESEVNDGLYVVTEVGKNFIRLDKEVFTVDSNMVTKVVYPEDIQVGIINLLKYEVDMRDKVGIKSESLSRHSVTYVDYDANNQVMGYPVSILGFLKPYMKARFMISVGGNTTALIQVKDEGKKNIIGEKEHVWMDVTSLKGWLDLSNGQNDISEYSAKVQSSTHIFICDFKSFRNLSKKWVWNPFNLKTGVIQSEQDETKIDATSENARMIIDGVEYHILMIDDPMGMHQHLEIMLQYVGGGLGVMSKNVEFHSYSVNVKTALKDKAIAFLHEIGGEIRSQAQRNSRRKTSQTAGSYQYKVDEDALAVHIGSDYWNAIYEEFGTGEHAINGGGRKGYWVFVDTGGKPQAPKGGKTYTKEEAKRVVAIMRKKGLNAYYTNGKTANRPLYRAFTATEGKIQSVAERYFGGVMTTEGLNYINNLLESLNIPYEFMEWNSDIPETYWVGEYQEIEPLNEDGMEECNFILTGNTKGSFLNLENVKELLKDTLGCDGMTDIMKSGSGIAIMYVTAYPVPSVEFGIHRLEITLRIKEWKVMAKFGKTGVTSDTPKKILFGAGTIHKNVTYDESSHKWNFENSIMGATQGGSKITITPEFADIEADGAMVAVKGLKVKTGETAEMEINFLEITKDIIKSAIIGVDGTSKDTNYDLIESKADVEDGDYLQNIAFVGKTLGGKNIIVIMDNALCTSGLESNGENKKEGVGTYTFACHADLDSDLDTLPYHIYYPKTLAMAKVKVINEFNDRYTGKLHKIGEVFEADDKRISEIMEVSKHLIEVQEDKEPAKRTRKKVGEDMEFELRTLKSDDLFPMFGILSKIGFKDLKEIITPDKIKDMKSMISQKDDEDENTDATTMLGVSVVMEVVSIIMKNLPSCKNEIYTFLSGLSGMTVKEIGNLDMVTFTEMIVAVVQKQEFKDFFKVVSKLFKMDLLFREYASPFILLDKVIGAGQLMDFLEVFDEKQQHNELWEFYIHKLPPWDERTFEQFKHDLKVGNKPKGERPTKEQLEATIKDSYKIMQNFEIEKEGGMDLFKLVGSIFINNKEANSQIDETNTKGQNLATKIGSAMETAGNKITGLGKAIAPVSAVLATALTTSTKSASDFQNGMAKMSTLFDTSKTSVSDLSKEFLTLSNKTGLSASELAEAGYQALSAGQSVDKVGKFVETAGNLAKAGFTSTTTAVDVLTTAMNAYGKSAGSADQIANKLVRTQNLGKTTVDELASAMGKVIPTASSMGVNINNLTSGYVSLTKQGIATAEATTYMNSMFNELGDSGTTLGGVIKEKTGKSFQECMNSGMSLADVLQITKQYADENGIAYNELWSSAEAGKAGLAILNGGVDEFNKTVETMASDTDDVGEALEKLETPSVKAHKAINQIKNSGIELGTAFIGALAPTLEKVCGVVEKATTWFSSLDEHTKTMIATAMGIGAVASPVLIIGGKIISGIGSMVGKIGTAISTISSLSGSIGGLSGVLGAITSPIGLVVVAITALIAIFVALYNTNEDFRNTVQSAWATIKETISTVIEAVKELISAFIQLVKQAWDAWGQDIINVVTNAFNYISTFIDSALKIVQAVIQTVTALIKGDWSGVWDGIKNIVSTVWDAIKNLISAGIELVKSIIQLGLNVVKTVFTTVWNAIKGIVQAVWNDLKSVIETVLNAIKSFISTALNAIKSVFSTIWNAIKSVVTTVINAIKSVISSVFNAIKSTITSILNSIKSVFSSVWNGIKSTVSSVINGIKSTISSGMNGAKSTVTGVLNGIKTSFTSIWNGCKSVVSGAIDRIKSIMNFSWSLPHLKLPHVSISGSFSLTPPSVPHFGISWYKKAMDSPFMFTQPTLFDVNPVTGTAKGAGEAGDEIMYGHSNLMNDIQDAVGHHDNLIVKALNDWFEQLFAIFEEWFPEFKGQLVLDTGALVAETAPAMDEELGKIIRRKERQMQTVTFGTKNSYDDFGLILTDKDIGFPEPKLEEVDVIGADGVIDLSEVLNDDIKYKTRKLQFTFTVLKGSKYWASTVADVANYLHGKKLRIQMDFDPAYYYTGRCKINSFKTSKRLCTITIDAECEPYRLDINGNGEKWLWDTFSFQNGFIRVNAVTVNGSLQVNLQNQRKIVSPTFTCSTAMTVTFDGVTYNLPKGKTQVLGIRLQYGTNYVTFKGNGTVKIEYQGGALMYRVYCNDSPLYDLRDEDLVLISPTVKIGENTAGSFEFSILPKHPHYEEVNELTSVITAYDGDEEIFCGRVVEITKDLYNRKKVICEGELAYFNDSIQRPAKYQGLTVRGYLETLVNIHNQQVKNQGIDKTFKVGAVTVQDKNDYVYKYTNWESTLEVIKTDLLNTYGGYLRIRKENGVRYIDYLADYPNTNTQVIEFGSNLLDFTHDMVASDIVTAVIPLGAKLEDVTEVEGLDAYLTIKDVNGGVDYVYSQEAVKSYGWIFKTVKWDDVHVADNLLRKGKEYLSDIQFAQITLTVSAVDLHMLHVDMERIKILDRIRVTSTPNGLDRFFPVSEMTIYLDKPSNNKLTLGTTYSKNSLSTKTESNNADIKKRIEDLPKKSEILEEARKNTSQLIHSATNGHVVTTADEQLIMDTADKKTARRLWRWNLNGLGYSKTGYNGSFDTAITMDGQIVGERLTVGSIDASKLSTSYKTSVEKQISNAKEDVENDVQEELKSYWTKTEVETAINQSANSIKLSAKETASGLISEALKSYSTSAQIEVTTNAIKSEVKKKVGYSEVISSINQSAESVAIKASKIKLEGLVTANKNFQVLSDGSIVAKNGTFTGNIKGSRITGSTINITDSNGCTIDLDASGLRINANKYTDIFGHQGGKLVIGTTASILEAMFSPICFYPESGGVWNMPLADGCNKFRFVWNVTKSSYVEIQTLFGAFGLTAWSSDKNLKKNIVSSEISGIDEIMKIPHFSFDWKDKDYHVDCGYVAQDMEKINDIYVIKIPQHDDKGNYTGDRYQIDETAIIPVITKALQEIIERLERLEKMNIPLSVLLENTKIRMIDSVNKVIQESNLPAYLIEGILSDILAEVRKQKNLELASDYATMNEEKDKKEGEEMANIKPYTDEIANAVYGEEVRSSIINALNKVNDDNNSYQDIKNQIVASKDDVNEAVAEFDAKVASAQDATTALIDATSKGNTAKSALDSAITSANTARTNLVSATTSANNAESTLKSATSTAQSVTASANDVKKNLDSSINSANSAKSALDTAISNAKTAKSNLDASTSTGNTAMNNLDTAISNATKTRSDLNAVISSAQSAQSSLSGVIAQASTAQTNLQNATNTANGVLGEITAENTSAKANLDALRSENFNSQEILSGVTDIRAYLGMIETEDVLGITMDYKNKTCTRIAGAKNLTAGADFDKFSMYGGRKRCNVSDGGTINAYYGEKGYTEDGSNGQVMVYQPKFYYLVCPLEYDRQETGYGYHLRKANYYVSETQRAGFKLHPAFYDKNGNEVDYILMSAYEGCIYDTSANAYLKNDEQVMDASKDKFSSIAGARPASGVSQNLTRPNIEQMAKNRGEGWHSFGIKTASMEQLLMIVEMGMMNLQTAIGQGVVNIPWATGSDTTSSYAGATGSTASLGNGTGRATETTTYEGGVATKNTADGKTSICYRGVENFWGNIWKFAYGVNIWGNGKMAGGMPYICSDFNYAEGKNTDNYEGAGFTVTKANGYISAMGYSTKYDWLFMASECLGNSSLPVGDYTYITENLNGYRIARLGGGWAGGSDAGGFYWSLADGVGYRGRLIGGRLVYVPTVTVMRVSDSSTSFQDLPKQIYSICCHLLMTGFCVLPSGRVKMKRYGHLYEKIYDMENLKLAHQHAKKGKGWYAEVQMIDSDPDKYLKELQDMLMNKTYHTSEYEVFYKNEHGKTRKIYKLPYFPDRVAQWAILQVIEPYLIKHLISDTFSAIPDRGIHKGLSRVKKAVQHDVPNCQYCLKIDARHYYQSVNHDILKQKYRKMFKDNDLLWILDEIIDSINTAEDEDLVSIYLLDEDIDPNTGIPIGNYLSQYSGNYYFSDFDHWMKEVKHVKYYFRYMDDIVILARTKEELHQLLKEINEYFHNNMKLEIKKNYQVFPTYVRGIDYLGYRVFVSYVLLRKQTCKDMKKKMVKIRKKVESGNMMNYSEWCSINSYKGWTDYGNCFRLTQKYVEPLIPYATKYYELNVKKGGKVAMKQYGTQRSTVKPEDVEITESRVFSYEDITEIKVKNPESDDEVTMYEFTLTEYNKDEYIRIQAEKNASLEEQMTQTQVALCDVYEMLAMVKIYANLIIKGIKTIDDVPTRIKDEVKQELVKEGHPELAEVGDEGMAVVYATLIIKGVKTIDDVPARIKDKVVQVLIDLDCGDLAGQAMNIKEGICTGIGVIGSIIASAFGGWDTGLVTLLIFMGIDYFSGLVVAGVFHKSNKTESGALESKAGWKGLCRKCMTLLFVLIAYRLDLAIGVDYIRNAVIIGFMANELISIVENAGLMGLPLPDAINKAIDVLTEQKEGMTNHEFIKKVADTVCKVALSYGILVHSPIIAQAILESGWGKSKLASTYHNYFGLKCGTKWTGKSVNLTTQEEYEVGTLTTIKDNFRVYDSMEDGIKGYFEFIQLPRYSNLKGITDPKTYLETIKADGYATSSTYVDNNMKLINQYDLTQYDKKEGNNSMSYDRTAVVNQAKAWLGYNEADGSHRAIIDLYNTQNPRPRGYKVTYTDAWCATFVSAVAVKLGYTRIIPTECSCNYMIKGFQQIGCWVENDAYVPKAGDVIFYDWQDLGIGDNVGSSDHVGIVEKCDGKTITVIEGNISNKVGRRTLAVNGKYIRGFGVPAYTTQSASTPAPSTTKKDITTIAKEVLAGQWGNGDDRKNRLTNAGYDYATVQAKVNELVSGKTSTPTKSVAEVAKEVLAGKWGNGTARKTALENAGYNYSEVQQKVNEICGQKSVTEVAKEVIQGKWGNGATRKSRLEQAGYNYSAVQAEVNRLLHMPETDELYVMEGGVHGITTQESWDTIKDWLESIGKLDTTDMDSEVRIVNSDLGMDDTKETPYSYPALKDHMDLASGAGALVNTNECHIQIADNGIYSMSDGKIGAYLNTDAHASSDALGTYTDDVVKSGTIDELGKESYQLINGELTIEQGAELTGEYFEKGTPFVPTDGITLSVPEVRVFRLGQVYGYDYMVQRKYHGVPIAYHDYGNYQIYGNEYNFEEDIKHAYVVDSDGVSAYAGVNDSEPLENLYSSDEILGIKDAADILSGKMAKFLNVDVQSVCLTYVPLNLGDGSECKIYLPAWQFDGINRTKDENIRMYLDAFTGEVYYYTYGEAAMIRAEMKKYLYFPYLLLAVIGCVVLAFSANADYDPSGSAVSVFRLAITGIAHKSEQPIEYSALFMWIKGMNGWLPLILPLLMSFGYIAVLSAERHNGMTGFLLIRSQNAKYCATKVTAGVLTGGILFMTANIVFGLMMLIAFPAYISFSVNEQMMYADWYGTGSMVLIYVVKRLIGSFLYGMAASMFGIGAAIFFRDRYMLLCLPFLLNYIYTQILQRLTLENPAVERFNSSNLMNVSGESGWGWTVGLTIVCYVILVLLYYAQVKRRHCDGMDRFSFRAAVHIAQAEFRQWLRSSRIIILFVMLVFVNVQVIGPLRQCKMLMGEMLSIPEAFVALGNSGVILLIIPILFLVLMADFPQRTGIDRFYQMRCTKRTWIFGQAVFAAAASCFVLLFLLVSSCVLMIGTGRWSLSFSDAVTHFTSVYPDRTGDYVVQLLPGNLYQQMTLEQALIHTFCLLLLYFLLISYVLLFSAVSNHRYVGILVNGFAIILGAVTCEVRMKQMWILPMAHTIPWLHYDEYLDRMNFPMWGSYLYLGAISALLLVLCFARAGHYQVKEMIEIRNVSLRLDGKSILNNISLTLEPGKIYGLVGSNGSGKTMLMKCICGFVHPTEGEIKTDGRRVGKDVDYLPNAGIIIETPGFIPYYSGLQNLRLLAGIRRKVTDDQIRKALKITGLDPDSRLPVRKYSLGMRQRLGIAQAIMEQPDILILDEPMNGLDKHGVADIRELLMALKKQGKLILLASHNPADIELLCDEVYEMELGNIRNFSMLLTTTNNNLFDTFFSDPWFNDPWYDDRDVQKAQKKLYGHNGKRMMLTDIKESDKGYELEMDLPGFKKDEIKASLENGYLTITAEKGLEKDQKEEEGKKYICRERYSGSCQRTFYVGDEIEQDDIKASFKHGILRLDIPKKQPKPQVEEKKCISIEGMAAKRDYYETLGVNKSADKEAIKKAYRKLAKKYHPDTNAGNPHAEEMFKDVTEAYNVLSDEKKRKLYDEFGFAGLQEGFSEEAARQAAHGGFGGFGGNGSFSGSYSSNGGPFTHQEFHFENGSGDMDDIFSMFGDMFSHGGGNHSGWSTSGNSGFTGNSGSWSNFSGGRSSAGRKGSDVMADLTISFDEAVFGCEKSISLQDPSTGKVSNLSIHIPAGIESGKTVRLKGQGNPGRNGGAAGDVLLKVNVTPSREFERKGQNVYSTIRVPFTTAALGGKARVHTLYGDVECSIKAGTQGGSKIRLKGKGISSMKNPSVKGDQYVTVEISVPRRLTPRAKEALEEYRAVSMFEVNGIAYASEKSNKISITDAKVTDHLMMIVTFSGGEKRVFDASVLTGSAFKPLEDDAIFSNFKIMHGVITWMNDEIDCAPEYIYEHSFEYEDNTSPIAMMPELSRFYGIIIKMYFNDTQQHHKPHIHAFYGDYEAVVAVDGDLLAGSIPAKQLKIIIGWLAIHEEEVYKAWNNAVRGEHFDKINPLMEKRISGHTGLLALIGSPVGHSGSPAMYNYSFEKLGLDYAYVAFDIKEDKVKDAIAAMKTFNMRGCNVTMPDKVEAAKYMDELSPAAQIIGAINTIVNDNGKLTGHITDGEGFVHNLKDHGIDIKGKKITVAGGGGAATAIQVQCALDGAREITIFNKNDAFFERTLQTAEKIKKAVPDCIVNVYDIDDTAKMTEEIQSSDIFANATIVGMKPLDDQSVVKDLSAFRPGLVVADAVYNPEETKLLREAKEAGCTCVGGKGMLLWQGVAAFKLYTGQDMPVDDVKKLFFSMKNKYPHIFEPITVRRMTVKNRIVMTPMGTNYGEQNGEMSFLHINYYEQRAKGGTGLIIVENASVDSPQGSNGTTQLRIDLDNYIPRLFKLCESVHKHGACIAIQLNHAGASAMSSRIGMQPVSASDVPSKAGGEIPRPLEKDEIMHIVKKYGEAAKRAQICGFDAVEIHAGHSYLISQFLSPITNKRTDEFGGSAENRARFAKLVIEEVRKQVGPFFPIFVRISADELMEGGNTLEDTLEYLQYFEKEVDVFDVSCGLNGSIQYQIDANYLPDGWRSFMAKAVKEKYNKPCITVGNIRDPQVAEDILAGGDADFIGMGRGLIADPEWVNKVEFGNVCDIRKCISCNIGCAGHRIGLNQPIRCTVNPAVNSGEDYMKTKVNKPCNVVVIGGGTAGLEAACTAAEVGCTTFLIEKKAELGGLASVISKIPDKKRLADFPNYMIHRASKLHNLFVFKNTAATVDMVKALNPDIIVNATGSVPTLPPITGLHDLVDKDGTNVATVLKMIERINEYPEDMKGQKIAIIGGGAVGLDVMEFFTERGAEVTMVEMLPMIGNGLDPVTKCDTNAKMAKYGVKQMTNTALQEVKNDRFIVKNPEGEIEEIPFDYGFICLGMRANTPVLSEIDEAFSNTNVEIVNIGDSKRARRIIEGTEEGRNILNVLARHDYLMNLSQLQYFKVLAQEEHYTRAAQMLSITQPSLSHAISQLEQELGTRLFEKKGRNVVLTRYGKMFLPYVEESLKVLNEGVQRIQEVNGSRHGIIHLAYIYTMGSEFAPKLVRKFLDAYPDYDIEFHFTVGTTSEIIDGLKDDKYDIVFSSYKDGEQDIDFKKIANQKLVLAVPMDHPLSIKDSVDLRDTIEYPQIYFEKGSGLRPVIDQMFEEIGQFPKVAFEMEEDSSMAGLVAQGFGIAVMPDIPMLRSLSVKTLDIYNPPYERAVYLATLKQRYLSPVAKAFIRFVIEETAMTLNQLSYFYQAAVLEHFNQAAEKMNITEPSLSRSIAALEDELGVTLFEKRGRNVILTKAGEIFLEHVSTILDDVKRAENKMHQIATDGGHIDIAYVSPLAKVFIPTIVRSFLTEKENKNITFNFFQDITSVNIEGLKKGRYDIIFGSYSPDENGIDFVPIIRQEIVAILPPGHPLTLKDTMEATDFADYPVLGYARHSGLGKYTRSFFKKHDVSPNFICESPDENGIASLVAQGFGIALVADVDAIHRDDICIRHLVSHESFSHTVYMGYMTGKYQLPAIKRFIEFVRESCSMAERITGHTELIGLMAYPIRHSSSPAMHNEAFAYLGLDYAYLAFEVDNNTLEDAVKGIRALKLVGSNVSMPNKTVVGQYLDKLSPAAELCGAVNTIVNENGVLTGHITDGIGFMQALKDNDIDVIGKKMTIAGAGGAATAIEIQAALDGVKEISIFNIHDKFWANAEETVRKINEKTDCKATLYDLDDKEKLREEMADSYIFVNGTGVGMKPLEGMSVVPDKSFFRPELIVIDVPYSPLETKMRSMAKEVGCKTMNGLGMMLFQGAAAFKLWTGKDMPIEHMKEVLNIRYDDMNKKYLPSALILYLNYFIHGVGCSILGQAVIKEALAASWGVQVMAITAISAALGLGRLIALPFAGPLSDKLGRRISTAIGSGSYAIYLIGLALAFNAGTHGGYQIAYICAIIGGIANSFLDTGIYPAVSEIIYKAPGVATMGIKFFIAIAQMLLPFVLGMTVATTAAGLTSYNTLFFGCGIIYIVLLVLVMLFPLPDTDAKAEGKKEGLIASLKHTHFSVESIAMIIIGFTCTGTFQLWLNCAQNFAKENVGWADPSVMQSYYSAGTMIALIVTALLTRKIKDVRFILVYPVICLATMVVVLVGQTKPLMIAGAFIIGWAGAGGLLQIATSVCNMLFPKIKGTVTALVMIASSLCNYTILTAASKMQPSQVMVMNIVLTAIGVVLGLFVNLRYTKMVELSKEDMAVHIVFFGTTVYSPANIVLCMECFGTLNYTGEYNYHTVKVRKEKIMNTIKVRDIEIGAGAPKIIVPIVGVTKDDIIAEAKTFDSIPVDMVEWRVDWFENVFEFDKVEEVLKELRDALGNIPILMTFRTSKEGGEKAIEPEAYAKLNIKAAQTGYVDFVDVEIFTGDEIVKKIIDGVHAAGARVIASNHDFFKTPAQSDIVYRLRKMQDMGADIPKIAVMPQNKRDVLTLLSATEEMVTDYADRPIITMSMAGTGVISRLCGEVFGSSMTFGAAKKASAPGQMGVEDLSTVLGLLHKSMMKKILHYLDEYLEEFLMVIFLIAMTLIMGIQVFSRYILGMSLSWSEEITRYLFIWSAFLSVSLCTRKCISIKIDQFIQLFPRRGKSLWKVLNLTVEFVFFVYLIPYSFIYLKNTIESGQVSPACGIPMYYVQAAPFVCFIITAFRIAQRWFGEWKIVLKKDEKPLEEGSIASVIEEAVVEDTYREKELVEDIEAIHSKAEKRKEKMSAAVVFILFVICLVIAIPVSISLGIVAVLPGAFDSSFTASASYVIRSMLGGIDSFPLLAVPMFVLAGIVMAHGKISQKLFDVFVYFIGKRTAGIPCAVIITCLFYGAISGSAPATVAAVGSMTIPLLMELGYKKDFSTAIVAVAGGLGVIIPPSIPFIMYAMATGESVSDLFLAGIIPGLLIGALLMFYAYYHCKRYGEDKKKINAKVSELRSKGLFSIMKDSIWALLSPVIVLGCIYAGIASPTEAAVISVFYALFVSLFIYKSIKVKEIWGIMVEAMKTYAPILFILAASTAFSRVLTLMQVPQTVSAWILAHFTNEIVLLIVINIFLLIVGMVMDTTPAILILSPILLPIVQSIGMNPIHFGVVMIVNLAIGFVTPPIGVNLFVASSLTDVPVMRIAKKAAPMIGYFLLALLLLTFIPAISLCLLMSRFGLLLCKKAGKYNKPRRSYSKYRLWRRAAAVMMILSLTAGLAACGLAGEGSQDAAKDAGVQRYAWPLGSSSPEDTVTQIYAEKFADEVERLSDGKMKISVYPNSVLGGDRELLESCKDGDIPFVVQNTAPQVTFMKDTAVFDMPALFDSIDEVREHVDNPKFMKLMQQVYNDGGYELLGYADQGFRVMTTNKKIESLADFKGQKIRTMENSYHMAYWKALGASPTPMTFSEVYIGLQQGTIDAQENPYEVIVSNKLYEQQDYVVETNHLPHLISLIVSEEFMKELTDEQQQIIREAAETAKQYAREQSDERIASKIKTIEDSGTQIITLSDEVHEQIRKECQPIYESIEKNVSSDIVDAYLTQMDKIEEIRAKIGECDDIIIKQLAVRMSHIQEIISYKKATGIPILQPEQEKKQTDALAAKLGDNEFEEEILDIFKYIMKNSRRIQAKSLFDYNIFLIGFMGAGKSTVAGELKDKLEMDRVEMDQMIVENRGMSISEIFDEFGEAYFRNLESNTLIELQKRKQTIVSCGGGVVMREENADHMKKNGRVVLLTAKPETIYERVKDSDERPILNGNMNVEYISGLMEKRKERYEAVADVTVATDGKNVTQICEEIIAKLIALDNEQDNKQAMCTAATYKTKDFYFGRTLDYEFSYGDEIAVTPRNYVFNFRHSGKLENHYAIIGMAHVAGDYPLYYDAINEKGLGMAGLNFVGNAAYAAADENSSCENGTCGIAKTKVAQFEFIPWILSLCATVADAKEKLNRILLVDTPFSSQLPVAQLHWIIADKNECIVVESMADGMHVYDNPVGVLTNNPPFPYQMAALNNYRGLSTKQPENTFAPGVELSAYSRGMGGLGLPGDLSSQSRFVRVAFTKQNSKSDDSENASVSQFFHILGSVDQQRGLCEVTEGKYEITLYTSCCNCDKGIYYYTTYDNSQITAVDMNRENLDEKLLIRYPVITEGKICWQNMLAELENLFALQDKNYREFHARLMPNIEKERIIGIRVPVLRKYAKELAHGSRLFLSVQKEKRVCNTVKENDCDNVEKFLNTLPHYYYEENNLHMFLIMQMRDYDTALAYLEAFLPYIDNWATCDSGVPAVFKKHKNELLLHVYEWLDSDKPYTVRYGIGTLMRLYLDEDFDIKYALDVAKIRSKEYYVNMMKAWYIATALAKQYDAVLPILKERLMDSWSHNKAIQKARESYRITPQQKEYLSTLKVMKIKSLFESKFIKVFDLQYQEGRHYYNATRRDEEDLVAAKSTEEFKKMLPDAVSCVVIWNPSGDDEKSGHEPCLLMNREFRYPTGQYLLSVPAGLIDPEDCTGDNDNTASLIKTAMRELHEETGLKVTEEDEVSIINPCLFSTPGMTDESNALVKIVLNRDSLNGMSQDGAVGGELFDGFDLLTKAQAKKILEDGVDEHGIYYSVYTWAALTYFVADLWRMNDKKYSLRPYLLAYKWHYAIGIFVLLAVDLANLYIPQFIGEIIDGITAGKLDMAGVGGIIFKILITGLIIMAGRFGWRYFIIGASRGIEYRLRDDMFSHMETLSARYYNSHKTGDLMAYFTNDLQAVRMGTGMAVITVFDAVIMTVMVLVKMVVYVDFKLTLFAFIPLIFIAIGCYFYGIESKKRQVKRQDAFSYLSDKVQESIAGIRVVKAFAQEDEDFKQFEKACENSREKNLAVVKLRAVFGPTLDAVIGISVIVTLLAGGRMVLDGQVSIGQFVAFNSYIDMLVWPMIAAGDCINTFSQAAAAWGRIRTIFEEKPDIVDMVPPENVIENDGMAGRNTDNLAEGIYDKIQIHGDIQLSHLSFTYPDGTKPVLSDVSIHVKQGEMLGILGRTGSGKSSLADLLLRVYDCENGMILLDGRPITDYPLAVLHRDISYVPQENFLFSDTLEENIAFGLEDRIADNPAILDAVKQAAKDACIHDNIMGFPDEYKTMVGERGVTLSGGQKQRSSIARALLKDSAILILDDSLSAVDTDTEEQILENLMETRQGKTTIVIAHRISTLQKADHVAVLSDGKLTEYGTPEELLELGGFYADISHKQQLESELGSMNSSENINKNEMNKKSSTMRLIAYMKPYAHWVIFALLLVLGLTAFDLYRPMLVGDAIDAFGANGDYDVIIATAIKYAVVLALSFAFNIAQTWILQKTGQNIILQMRKDLYRHIQSLGSRYFDITPVGKLVTRVTNDVEALNEMYSGILVQLFRNIVKIVGLAGVMLVLDVRLAAISFVLMPLVIGLTVLCQKIARNIYRLYRTRLTDINTFLSEHLSGMKIIQIFGRQERKFEEFHDKNTKLYKAFYREMLMYAVFRPLIYILSILSLMIVLWFGSRNVFDEIISVGTLYIFSNYIRSFFDPIQELAEQFSTLQSSIASAEKIFTVMDEDEFIPEVENPKQPDKITGKIEFDHVWFAYDGENYVLKDVSFVINPGEKVAFVGATGAGKSSILNLIGRYYDIQKGHIYIDGIDIRQLSKKQLRSAIGQMQQDVFIFEGDVAYNIRLNDNDITDEQVKEAAEYVNASHFIEKLPQGYHEPVTERGATFSAGERQLLSFARTLAHNPSILVMDEATANIDTETEILIQEALEKLMDGRTTIMVAHRLSTIQHADCIMVMHKGRICERGTHRELLEQDGIYRKLYELQISMVWKINNNCQIFIEKTDSIAGRQKEIIPHVSAYYVDKYTTISEKGVKTGSNRLCGTANQELLAGYMLYKYLGISSDEQLVRNEHGKPEIADSGTFFNLAHSGPYVVLAISDRPVGVDIEQTKRMSFKVAKRIMRKEQLDKLEGFENESEAFQIELAKYWTQYEAIMKLVGTGFSGELDDRTMEAYEKRVVFRELEDYVIAVVTKMKKIQLFLKYLVLMLFLTVWIIIMFFTDYMNSQSVKLYCMFVVGCGCAYSIWEKTYVPDARSYIAEKAIALILIVTVFIRLLCFMRIFLLFFYPYMLEYSQSSFSIATCAVVGTLITDMTICSVNMMSSGDKGVQGLQYLNYFSYSLKFLLLNISLMTGDVATIAPGVTIGDRAVIGPKAMVYNDVEEGQEQCMLNMNNEEALAIIFANSYDALIPEMVSERLMASIPFAGRYRLCDFLISSMVHSGIDNISLIVKKNYHSLMDHLGSGQEFDLARKNGGINIVPPYAQKQIKVYEGRVEAIESLKGYLRKCTQKYVIMADANYVFNFDFRELIEAHKNTGADITAMYRKQEVPKVFLRPNGNNDEMYYTFDIDDGRIKKIYINAMDMGKVNFGMNIYIMEKEKLIRIVDDAFVHGYSYFTRDLMAANTDSLNIQAYEYTGYASQITDMKSYFEENMKLLDEDNREALFKSGNSIYTKIRDDNPTRYINGSKAKNVMVADGCVIEGTVENSILSRGVKIGKNAKVKNCILLQDTVIEDGANLEYVITDKNVRVSRNRSLTGNDSFQVYVAKGQTVMAENRNTINIKSDESGEIKVADEVVAIIAGLAATEVEGVSSMAGNITNEIVSRLGMKNLSKGIQIEIADNEVVVDVALNIAYGYSIPEVSTKVQEKVKSAIETMTGLSVATINVRIASVDMGENMTRSKIRENVFKMLFRVEFHDKSELAEQMELLNDELTNPTDEERQYIDEKCSAIIEHMAELDALIDEKSTGWKTNRMAKVDLAIIRLAVYEIKFEDDIPTKVSINEAVELAKKYGADESGAFVNGVLAKFAMANRNIYSVAQVNSYIKNMFAQDFMLRQVSIKGEVSNCKYHTSGHIYFTIKDAGAAMNAIMFAGSRAAGLSFHMKEGDQVIVTGSVEVYEKTGAYQLYAKKIELDGEGNLYLKFEQLKHELEEMGMFAAEYKQPIPQYAGRIGVVTAPTGAAVQDIRNVSSRRNPYVQVILYPALVQGEGAANSIVKGIQTLDAMNLDVIIVGRGGGSIEDLWAFNEEIVARAIFDCRTPIISAVGHETDWTIADFVSDRRAPTPSAAAELAVSDYRQTLERLDNLRRRMDRNLTGRIDFFREKLSHIKTRLNFLSPQNKLNENKRRLADIEDALERIMKQRLSDCRQRLALLSGTLDAYSPAKKLAQGYAYVEVEKKGALHSVSDINAGDDINIYLIDGHARAVVSEVINDEQRKMNKENEKTLTLEERFAHLEQIVARMENADVSLDEAFELYKKGLDEVKSANDMVQGMEKAMLVLNSDGQLEEFMSLNGNLNKSQFMEELQQKVEHINNVLEKFLPAEEGQQRIIFEAMNYSVRAGGKRLRPMLMEETYHMFGGSSAVIEPFMAAIEMIHTYSLVHDDLPAMDNDEYRRGKKTTHAVYGEAMGILAGDALLNLAYETAAKAFGMEVADARVAKAFAVLTKKAGVYGMVGGQVVDVESEKSDDCPITREKLDFIYRLKTGALIESSMMIGAILAGASSDEISRVEQIAAKLGLAFQIQDDVLDVTSSLEVLGKPVGSDEKNNKATYVTFEGLDKAVSNVERISKEAEKLLDDLGYDDAFLKELFEYLIHREKMVLEKIQKENDIKKLTPEELEQLKDEIRQFLIESISVTGGHLASNLGVVELTMALHLCFDLPKDKIVWDVGHQSYTHKILTGRKDGFSSLRQYGGMSGFPKAEESDCDCFNTGHSSTSISAGLGLATARQVTGDDYHVVSVIGDGALTGGMAYEALNNASSVKGNFIIVLNDNNMSISENVGGISQYLSGFRTADAYRDLKNNVMNSLNHIPIYGERMVKHIRNTKSSIKQLFIPGMFFEEMGIIYLGPVDGSDIKEMCRVFDEAKRVDGPVLVHVLTKKGAGYGPAERYPSRFHGAEPFVIETGLPKNKRTKANYTDVFSTVMKKLGERNEKVVAITAAMADGTGLRRFHRNFPERFFDVGIAEAHATTFAAGLAKSGLIPVFAAYSSFLQRAFDQILHDVCIQNLHVIFAIDRAGLVGSDGETHQGIFDISYLSVIPNMTIMAPKNKWELSDMMKFAVAYDGPIALRYPRGTAYDGLKEIRQPVELAKSELIKKGSRVAIMALGSMVKTAVDAVKLLEAEGISATLINARFAMPFDKEAIKELPAEHSLLVTMEENVQSGGFGEHVTEYVKTNGIALEVLNIALPDCYVEHGNVEVLKKELHVDAESVAKRIIAALMKERLDVLLVNRGLAPSREKAKTMIMEGNVFVNNNREDKAGSTFPDDCNIEIHGKTLQYVSRGGLKLEKAMKHFDITMDGKVCMDIGASTGGFTDCMLQNGAKKVYAVDVGYGQFAWKLRQDERVVCMEKTNIRYVTPNDIDDELDFASVDVSFISLTKVLGPARALLKDGGEMVCLIKPQFEAGREKVGKKGVVRDKSVHEEVVNNIISFALSNGFSVLDLEYSPIKGPEGNIEYLVHIKKTDDPIKEESVDIHSVVEAAHGELDRKMKHFVVIANAYKDRDFALTNKIVAYIEQKGGTAKGLMSNVEAISDNEFELEDIPQDTQCILVLGGDGTLIRAATRVETLEIPLMGVNLGTLGYLCEVEEATVFDAIDSLMADKYMTEDRIMLTGHKRGSETSRVALNDIVIHRKGNLQILSLNVYVNGEFLNNYHADGIIVATPTGSTGYSMSAGGPIVDPKGDMILLTPNNAHNLTSKSIVLSGDDEIEIEILSRREQNDEMACVSYDGDTTAELAVGDRFVISKAANHTKICKLHQRSFLEILRKKMGNYSMKTNRQSKIIEIIQKNEVETQDELSALLEKDGFRVTQATVSRDIRELKLTKIPTASGRQKYAVITDAPENLSKKYERVLREGFLSMDMAQNILVIKTVSGMASAVCAAIDAMKMREIVGSIAGDDTIMCAIRTVDDTYAVMKKIRRIVEMLQNLHVKNLALIDECEVEFSDGLNILSGETGAGKSIIIGSINLALGEKVQKEMLRDNEKPAFVELIFSVEDPKIIEALRELDVEVEDGCVILSRKITQSRAVGRVNGEAVSVSRMKEIASYLIDIHGQHEHQSLLSKKKHLDILDEYAKQSLGDKKQQLFASYKAYRALNDEYEKSNIDNEDRSRELSFLEYEVKEIEEAALVPGEDEELEAQFRKFSNGKKIMEGVNAAYSATGGEMESASELIGRAVRELSQVSGYDEDVEALENQLSEIDSLLSDFNHEISGYISQAEFDEETFYETQKRLDEINHLKSKYGSSIDDILIALNEKRERISVLNDYDSYLQKLEQQLAKKEKELSQISDEVSEIRQRSAVKLVSEIKSALNDLNFLDVQFDMQFDRLPDYTANGIDAPEFLISTNPGEPLKPLGRVASGGELSRIMLGIKTIMAENDHIESLIFDEIDSGISGRTAQMVSEKMNELGRNHQIICITHLPQIAAMADAHFLIEKAVENKSTVSRIRRLTDNDSVAELARMLGGAKITDTVMESAREMKELAMEKKALSMRKFFGKFVSVTLAAVVIAMFALSSDDKWCSRVDKAFDESALGSFLNESKAGYGRYATGLPGQTASVLADSGENGGNGENSGTEQDIGQTADTASTHRATDRDYEETGKISDGISVEGVYACGRLTGIYEQTEGVLVVNTTEVTDEDGKKVNPADKKVQCGDYILSVNGRTVADKEELSEAVNDIMKEYDESLDESLKDKRTVSIKFLRGGEEMSADIAPVRMDDGRYYMGIWVKDDLAGIGTITYYTKDGRFGALGHGIGDGTQSGNLLYANSGDLYSMKLTKIKKGKAGTPGEIGGVVYFGKKSHIGTLDCNSNLGIYGQLDSDELSEYAAEDTYYPVADKDEIHTGSAQMISEISGKLEKYNLEITNIDKKATDTNKGMELKVTDERLIELSGGIVQGTSGSPIIQDGKIIGAVTHVFVDDPTGGYGICIDEMLMKKIDFDNDSIKKNILQAALPMLVAQILSLLYNIVDRIYIARIPDVGTTALGAVGLCFPIIMLTIAFSNLFGSGGAPLFSIKRGMGDDRAANTIMNTSFTMVCTFAVIFTALCMIFAKPLLILFGASENALKYALPYLLIYLLGTLPSMISTGMNPFINAQGYSTTGMLSVAIGAVANLVLDPLFIFGFNFGIKGAAIATVISQILSALYVLHFLRKKAELKVRLMTLSEFGENTRYAKDIISLGTSGCVMQLTNSLVSICCNNVLSVTGGDLYISVMTIVSSIRQMVETPIYAIVEGSSPVLSYNYGAKRPARVRKSIFTMGLLVLLYTAVMWSVIILAPHALIAIFSSDATLMDDAVKALNIYFAAFIFMDLQYVGQTTFKSLNKKKRAIFFSLLRKVFIVVPLTYILPYSFGMGTDGVFMAEPVSNVIGGSICFVTMLSTVLPELRRMEQMKITQIHTNKPQSLSFEIFPPKKEEDFKNIDEMLEILCDCHPEYISVTFGAGGSSNNNKTIEIAKKIKNQYHVEPVVHLTCLCYNKAEIDEFTRQLSYEGIENILALRGDRNPNVPAKEDFLHASDLIKYIKDTTGDQFCIAGACYPDIHPEAADKVDDIKNLKKKVDAGAELLLSQLFFDNDTFFNFAEDCRLAGINVPVIPGIMPCINAAQIQRMVTMCGAKFPEKFQKIVHRYGDNKEALFDAGMSYCESQIIELLANDVEGIHLYTMNNVRVAKRLTEGIKNLIMKEKSRSTFSGNIGFVLAAAGSAVGLGNIWRFPYLAAKDGGGLFLLVYLILVLTFGFALLTTEIAIGRKTGQGPLTAYGLINPKGKFIGVLACIVPAIILPYYCTIGGWVLKYFTIFITGSGKNAVADGYFTGFITGQWAPIIFGVVYLLLTAAIVIGGVNKGIERFSKVLMPILVVLIFAIGIFSLTLHYKDASGTVRSGLEGLKIYVIPDFKGLTMQKLFTVFVDALGQLFYSISVAMGIMVAYGSYVKKESKLMGSINQIEIFDTLVAFLAGLMIIPAVYVFMGRDGMSAGPGLMFISLPKVFNEMGIAGDIVGLIFFMIVAFAAVTSSVSIMEAIVSSLIDRFHWSRRKSAILVTVYALIAEIIVCLGYNKLYMEVKLPNGTVGQILDIMDYVSNNVLMPIVALATCILIGWIVSPKVIIDEVTRGGSKFTRKGLYIIMVKFIAPAFLLILLLQALGIITFMRLKNNYNIAKKCSGDICTILHEQSKDGTKDIDTRVIEITLPDGKKEYLATNLFDKSITQKMFSELYFYRWLLSNLSSLIKNQADDEIGITADSSNKNFDMVSDKFPCMTPEVIAVMKMTMLKAGLSMVFMSSLVNIGSLTLQTAINMSAKDSMAKEYFADNARFADLCNNILYGGREVIRPENLKERDTTEVLTALGLDKKTIAMQKLRDIFKNASIKYTGKSYVVLIGVENQSDIHYAIPVKNMFYDVMAYGNQVKETAKKHRKDKDTTTSDEFLSGFTKEDKLIPVITITVYLGTKEWDGPRKLSDMFGDVDEELLPFIPDYRINLLAPREITDFTGFRTSIRQLFEVLKNAYDKEKMQEVLQNDEKFSRVDRETVEAINLFAGTDIDIDEKDEVIDMCKAWEEQKNEGRELGREEGRELGREEGRELGREEGREEGRIRQAKVTALKLQKKGHSIEDIAECVDFDEETVKKWLVSMSKIFKNLIPYWRWIILIFVFLIAQAYCDLALPAYTSDIIDVGIQDHGIEHILPKEITSEDYQMAQTFMLSDEKEKFTDCYEAEDASKSDDGVAKYKLTADSDTLDKLDEELLVPLVMAYQAFQSGEQMDVDASAIPQGVALDDNMIKQIRSKVQEKIDAVGSATLKSMGVTFATKCDENAGIDVDANQVAYLWKAGAKMAAFAAIMLIAACVVGFAASKVGAAVGRDLREKTFSKVVGFSNAEINKFSTASLITRSTNDIQQIQMVTTMMLRMVLYAPIVGIGGIIKVAQTKSGMEWVIAIAVAAIMVFIFTLVGIAMPKFKIMQSLVDKVNLVSREILTGLSVIRAFGREKEEEKRFDEANRELTRTQLFTNRVMTFMMPGMSMIMYCITLGIVWVAAGRIDKGSMQVGTMTAFITYAMMIVMSFLMLSAMSIMLPRAGVAAERIDEVIKTNSTVNDPKEPVTEADHRGVIRFNHVDFRYPGAKEDVLSDIDFVAEPGKTTAIIGSTGCGKSTLVNLIPRFYDVTGGSIELDGHDIRDYTLSELRESIGFVPQKGILFSGTIASNLRFGKADASDEQIKKAADIAQASEFIETKNDRYESSIAQGGSNVSGGQKQRLAIARAIAKDPHIYVFDDSFSALDMKTDARLRAALAEVTENASVIIVAQRISTIIHADQILVLDDGKIVGKGTHEELLKNCDVYMQIAQSQLSAKELGIDDNKKEGMMSENNNEQFKMPPKRPRGPMGRGPGMVTEKARDFKGSTKKLIKYLGRYWAAIIAVMIFAAVSTVFSVAGPKVMGKATTALAEGLMNKIAGTGGIDFDYIAKVLLFTLALYVVSAIFMFVQGLIMTGITQKTCYRMRKDITSKINRMPMKYFESRTYGEVLSRITNDVDTLGQSLNQSITQIITSVATLVGTLVMMLSISPLMTLISLVILPVSMILISFVIKHSQKYFRQQQEYLGHINGQVEEVYGGHLVIKAYNKEAETVKTFKEANNVLYKSAWKSQFLSGLMMPIMQFVGNLGYAGVAISGGILAIKNVITIGDIQAFIQYVKNFTQPIQQIAQVANQLQSMAAASERVFEFLDEEEEDITVENPVKLDHIEGSVEFSHVHFGYNPDQIIINDFSAQVKPGQQVAIVGPTGAGKTTMVKLLMRFYDVSSGAILVDGHDIRDYNRADLRDAFGMVLQDTWLFKGTIMENIRYGRLDATDEEVIAAAKAAHAHHFIQTLPGGYDMELNEDASNVSQGQKQLLTIARAILADNPILILDEATSSVDTRTEIRIQKALDNLMRGRTSFVIAHRLSTIKNADMILVMKDGDIIEQGTHDELLAKNGFYAELYNSQFEEMSTLNVAVADEKKNMQSLLKGMEFLGTAKSSDEAYSMINGNAGSDVILVYVKRASGDTEPLDDTYMEKKSLETQVTDIIHEIGVPAHIKGYQYLRTAIVMCVEDMEMLSSITKLLYPTIAKKYKTTSSRVERAIRHAIEVAWSRGRMDTIDSMFGYTVNYGKGKPTNSEFIALITDKIRLGMMDKIKILMAASEAIPYMKTGGLADVVGSLPKYFDKDRYDVRVILPKYKCMDDKLLPQLKFVCHFYVNLNWRRQYVGIFTSQYDGVTYYFVDNEFYFAGDKPYNNIYEDVEKFAFFSKAVLEALPVIDFAPDVIHCNDWQTGLLPVFLKTVYGSDNFYAGIKTVFTIHNMKFQGRWKIKEVADVTGLPEHIFNSGELEFYGEANYLKGGIVYADEITTVSPTYADEICTPEGGEGLDGLMLERRRHLRGIVNGIDYDVFNPMKDTYLDKHFSVRELSGKVVNKRQLQEKYGLAVDNDVMLIGIVSRLTNQKGFDLVAYVMEEMLSTMNVQFIVQGTGEQQYEEMFNYFHGRYPQKLGVYIGYSEENAHEIYAGCDAFLMPSLFEPCGLSQLMSMRYGTLPIVRETGGLKDTVVPYNEYENTGDGFSFANYNAHDMLHVIKYALDVFENHKDRWQEMMQRAMRHDFSWKASAKEYEKLYDMLLGNMKYTEFLHTIETEITARLDNDFKLTIHPVKKNNGMIYDGLVIINPKFNIAPTIYLNPYYHWYLDGVSIDSILDAILSTYNDFKPTEDFDISFCDDFSKVKEKIIFQLISYDKNQKQLKDMPYIKYLDFAIIFEVYVGAELPEFGTITVTDALLSRWGIDTETLIRASMQNTPKILPCSIINMAEFLAKKCPGYANQMRAVCDFDSLPMYILTNSRQTNGASAILYPGVLSSLAKKLGGNMLLIPSSIHEFLVMPLDSDIDVCNLSEFICEVNSTEVRDEEVLGERYYIYDSKTDTVYMVKKIASRVYMGLIFLFLYLPIVVLIVLSFNNSKSKVKWGGFTLDWYIKCFQSERIMSAFSTTLQITLLAAVISTIIGTLAAMGISAMKKRNQTIYLGATNIPMLNADIVTGISMMLLFVKFMNLGFVTVLIAHITFNIPYVILNVLPKLKQTNKYTYEAALDLGASPLYAFFKVTWPEISPGVFSGFMMAVTMSLDDFSITYFTKGAGVNTLSTMLYTELKKGVKPELYALSTILFFTVLLLLVVVNINSNRIPVSASKKPARAKKLRIVKRSVSIAIVAVLVIGCFSVFTISAKSTNNDNAITVLNYGKYIDESVIDSFEQETGITIKYEEYEEPEEMYTKYKSGAIDYDVICTSDYIIEKLISEGEVNKIDYSSMPNYKNVNQDIIDMSASFDPTHEYTVPYFYGTLGILYNKKMADASDLNTWDCLWNGKYKDNMIMINSVRDAFTPALRTLGYSINETDTAKLDEAFDILNKQSSDVLAYYVDETCDEMVAENAAIAVCYSGEAAAAMAENDNLDYIVPKEGSNLWIDSWFIPKTCKNKEGAQEFLNYICGDEPAQLNFEYVYYASPIQAVIDNQDEETKENEAINPPSDMLKNCEVYRALNDNDATLYNTLWQRLKSDMSKIKKQLLAGPYLIWIIGFIILPLFMIVYYAFKSSDGGFTFEYVAAIAQHTNIKALLLSLRLGIICTIICLVLSYPLAMILNGLKIKNQSFVVFVFMLPMWMNFMLRILAWKQLLSKNGVINSILTTLGLPGFNIMNTSGAVVLGMVYDFLPFMLLPIYNSMTRIKNDWIEAALDLGANKVTILFKIILPLTVSGVISGIVMVFVPSLTSFAISQILGGGKVLLIGNIIEQDFVHGSQWGAGSGLSLVLMVFVLISMALVNLFDKEGDQSALWMGKKLIDFIDITKSYNGNVVLDDLNLYIRENEFLTLLGPSGCGKTTTLRMLGGFETPDKGKIMFDSKDITNVPANERNLNTVFQKYSLFPHMTIAENIAFGLKIKKKSKAYIDDKIKYALKLVNLDGFENRSVDSLSGGQQQRIAIARAIVNEPKVLLLDEPLGALDLKLRQSMQYELIRFKNELGITFVYVTHDQEEALTMSDTIVVMNQGYIQQIGTPEDIYNEPENAFVADFIGHSNIIDGVMIKDKLVEILGVKMPCVDEGFGENTPVDIVIRPEDVELVPAEDGYMQGDVVSNIFKGVHYELEVKANGYDWMVHTTKYVEVGSHVGIKVIPFNIQVMHKPESSDEKAVEIDVMDIGHRMKELRIQYGLTQQELADRAELTKGFISQLERNQNSPSVGTLLDIIQCLGMTPAEFFTDSEPEQIVYKANDYFEKIDEGKNSKVEWIIPNAQTRSMEPVRLTLHPGGSSEIYLPQECEEFGYVIKGTVKLCYGGKVHTVKAGESFYFKAGKKHFIENKSSKDAMLIWVSNPPSFMKMGFKENIRFAFIDEFANEIGKEKAYRMMSNFKCERVPALEYFLTRDYNGRIKPYIVWDDSKNIIVAYFTLITTCMILKPYEKTDPEHTKEKDVEKIISCIELEHFALNDVYLKLVKEDGYSNSGIGNYVFKEYISTVIAVLVSEVNFFYLILHAYNNDKVINAYRNMGFETMEDDAEAVIPTLSDVRALHSDYAGDCKFMFRDVESILTDLDMYNNSQSPIMVISGKKAEKMLSKSEKPIADHTKTIDRAKDKLRKMGKKMKLMQNSGVPIYQQIADSFKTDILAGRYEQGEFLPSIRGLAKDLKISVITTMKAYEQLADEGLITAAQGKGFYVNAQDSEMIKEQHLRKVEESLTDAIAAAEVAGISNDELKGMLEALLEVDKMTTKNAIEAAKITKELKNFTLDVENFAIPQGFATALIGENGAGKTTLLNILAGIRLDYKGEITYFGQYSDKQRENSGDIKNRIGYTGPGKYYLPQWTVKDIEEISKLMFDDFSADDFHRYCEELAIFSHGSIDMKKANSSFSDGMKMKLMLAGVMARKTDLLLLDEPASPLDPLMRDKLCQMIGEYIHEGNGKRSVFFSTHNISDMENITDYAIIMENGQIVEQGFVEDLKEKYILIKGDAADTEAAGKVLYSMTKNPYGFEGICLAENIDKLAGLNVTKEIPTLYQISVAVMKNNTKIVMRMESKSGSMNEKMVSQEHDTERTINKKDNKAKNEVLTYIRDYRVMTNLKYRLITNILIPFLAIFTSMLIACSKTIWAWIGVIVIVYDFYMMCEVVQDYFCFGCMCKKNAFGMHFLKTGFNGVRYFENAVLVDILVRPLRIGITILIASIPFIKFGVNIWSIFDIIMISSIVSVGSLNIFRYMDLGMYIYLLALIVIFPAIAGSIAVLIYGAKIWFIAPVLAVVLVGVIAATYYHMMVRIRRSYVDVMLKDIKLGFKLLRYGYKLKLNVIMLVFFAVIGIASDIMSKGTSIIGGVYFMMCGMFTFQLIMSMDVSELIQSTSLKKKLQIYIPVMSSTVINLVVFTFLVIERVILIQNSVADKKQLIFTLFTLDVELLTVYLYTSICYKYYVLGFIVFMVLFMGVFTAFSGAAFVPVSNAVFKLGLPVVALLGYIAIFAGGALEILIGELLYKKPLSEFAFRGFFRDAKMDSDSYSKQQLDDLFMDMIAYYDGDPKRIQHFTKVHSYARLIGIGEELDDASLFILEAAAYTHDIGIRVAEEKYGRCDGKLQEQEGPIIAQKMLSQLGFENYIVERICFLIGHHHTYDNIDGLDYQILVEADFLVNLYEDDAGNRAIDKAYKRIFKTETGKKIFRLMFGYEEEDMSRAGRRLPALVRIMQLISEIVINQNSKYAEMRAQEQKRFIDEFPVKNPVHFVEGVYDTKSFYDMARGMEAVPEGGERCFKCYRLRLEESAQYAREHGFDFFTTTLSISPLKNAEKLNEIGKDLESQYGVRYLFSDFKKKEGYKKSTEISKQYDMYRQYYCGCVFSKEQRDREIAARGMAQLWGGRFTKETDQLVYNFNASISFDQKFYKEDIEGSIAHVTMLGKQGIISQAESNDIVACLKQILKEVESGELEISSKYEDIHSFVEATLIDRLGDTGKKLHTGRSRNDQVALDMRLFTRKTVKETDDELKELLAVILKIMKENTQTIMPGFTHLQKAQPITLAHHMGAYFEMFKRDRSRLCDIYKRMNYCPLGSGALAGTTYPLDRDYTAQLLDFYGPTLNSMDGVSDRDYLIEFLSALSTIMMHLSRFSEEIIIWNSNEYQFVEIDDAYSTGSSIMPQKKNPDIAELVRGKTGRVYGALMSLLTTMKGIPLAYNKDMQEDKELAFDAFDTAKGCIALFTGMIDTMKFNKDVMRKSANNGFTNATDAADYLVKKGVPFRDAHGIVGRIVLYCIDKGIAIDDMSIDELKAISPVFEEDVFDAISMETCVSTRCTVGAPSKTSMDKVIAVYDEYMKSNWQDEVMSEKLKVGILGGTGMVGQRFISLLENHPWFEVTTIAASPRSAGKTYEDAVGDRWKMDTPMPEAVKKIIVKNVNEVEEVASQVDFVFSAVDMSKDEIKKIEEDYAKTETPVVSNNSAHRWTPDVPMVVPEINPQHMEVIKYQKERLGTKRGFVAVKPNCSIQSYAPVLTAWKEFEPYEVVATTYQAISGAGKTFKDWPEMVGNIIPFIGGEEEKSEKEPLRLWGYVDDEKKQIVPAESPVITCQCIRVPVLNGHTAAVFVKFKKNPTKEQLIEALEKFSGVPQELGLPSAPKQFIRYCEEDNRPQVALDVDYEHGMGINVGRLREDTVYDWKFVGLSHNTVRGAAGGAVLCAELLKAQGYITKKMKNNKYEIDMVNGSIMDKLISFALPLMISGILQLAFNAVDIIVVGQFSGSKSLAAVGSTTALINVFVNLFMGISLGANVLAARFYAAGKDKEMSKTVHTAIMIALISGIVMGVVGVIFARGALEIMGTPDDVIGLSTIYMRIYFCGMPFFMLYNYGAAILRAVGDTKRPLIFLIISGCINALLNLFFVIVCKLDVAGVAIGTIVSQFVSSVLVLYCLSKADTSYKLCFNKLAIDKEYMLQIFQVGIPAGIQSTVINISNAMLQSSVNSFGSIAMAGYTAANNILGFLYVSVNSITQACMSFTSQNYAVGKQKRMDRVLIDCLFLTTAVALVMGSASYIFGTQILGIYTSNSEVIKSGLEIISITTIPYFLCGIMDLFPGALRGMGYSTVPMILSIIGTVGVRIIWIYGLFPSHRSLFFLFISYPGSWIATIIMQAICYMFVRNKVKATIGARKLMKAKHTDLEKLEQLYKESGNQLVVLYGRRGCQKEELIVAQSEDRRSIIGFCNWDKPMMTMDELMGKSLIITEKPSVAQEFAKVLRVSGRNDGYIENGEYVISWCVGHLVGLVYPESYDMKYKKWRLEDLPFLPKEYKYDVIDSVRKQYNIVHALLQREDIDRVYWAGDAGKEGQTIEENIRNFGGVREGMEELRVWIDSQTEEEILRGIKEAKPMSAYANLGKSGIMRTIEDYAMGINFSRVMSVKYGNLLNDAAGTRSYTAIAVGRVMTCVLGMVVIREREIRNFKETPFYRVIGRFTDAGVEAEWKAVEGSRYFESPLLYKENGFKEEKDALALIEELNGKQAKVKSIVKNIAKKRAPLLFNLAELQAECSKKFKISPDETLQVAQDLYEKKLTTYPRTDARVLSSAVAKEIGKNISRLKGFETTADFVEHIMQKRLYANIADTQYTDDSKVTDHYAIIPTGQLTELSGLTSLQRAVFELIVRRFLSIFYPPAEYENVKLVVDVDKESFFASSKVLKSEGYLQVANPPKKKSFEESNARILGKNSETADSTDENSTANGSNDEIVVNPKVMLELADKLKAGDEIACQGYNIKFGKTSPPKRYTSGSMVLAMENAGQLIEDEELREQIKGSGIGTSATRAEIIQKLVRIGYLNLNKKTQILTPESLGEMVFEVVYMTVPALLNPKMTANWEKGLDGITRGTVDFWEYRGKLESFIRKETEKMIEQNLRPEIADRISSFAGKNARGAAARRKIGVKCPVCGGEIVTTPFGYGCANYKNDKSGCNFNIGQVAGLDIPEEQVKKLIEEGITDTIRGFKSKSGKRFDACLKLNKDEQTNKVSATFDFENVKPQKVEGIVCPDCGGDIYVSPYGYRCANYNRQTEDGCHFFVGRIADKQLSQVQFLELMANGRTETIKGFKSKSGKRFNACLVLKKEPVTEGSEKMHTVVAFDFDNVEDEIIKDVVCPLCGGQIKKTSFGYGCVNYKGDEPGSCRFSVGQIAGKTITAANLKQLLNDKKTETIRGFKSKSGKRFDACLVLKEDENKKLSVQFDFDHVEPKTVKDVVCPKCGGKIQVAPFGFVCENNRRDDPESCRFMVGKVASVKIKESVLKELLTKKKTEVISGFVSKTGMKFDAPLKLTEDGDIAFDFPEKPKPIETNVLCPKCGRPLKKTQWKYECECGFNVWHTVAKVELSEEILTELFTTGKTKKKVTGFTSKAGNVFDTCLKFENDQISFDFDNPGEEEVQSTAEVHNNADAQNNADAQNNADAQNNADAYNNAEVQSTADDAPDKTTMNNTTMDEMGIPEEFLAGFDMAADSAQADDVSEAAFAAAHELFGEMENAKITNLYNLDETIAKEYLSQFTYPWEALAGISDFIKELGPTLDPEIYEKRGEDIWVAKSATVFDSAYLHGPLIICEDAEIRQCAFIRGSAIVGKGSVVGNSTELKNVIIFNSVQVPHYNYVGDSILGYKSHMGAGSITSNVKSDKTLVVVKDVYDTKEEIETGRKKFGAMLGDHVEVGCNSVLNPGTVIGRNSNIYPLSRVRGVIPANHIFKDKDNVVLKKMIYTKEVENMCPVAKGAKHEPAPIPEEGKWVHSKKIEDISGFTHGVGWCAPQQGACKLSLNVKNGVIEEALVETIGCSGMTHSAAMAAEILQGKTILEALNTDLVCDAINTAMRELFLQIVYGRTQSAFSDDGLAVGAGLEDLGKGLRSQVGTMYATKAKGVRYLEMAEGYVTGIALDKNDEVIGYQFVSLGKMTDFIKKGDDANTAWEKASGSYGRVTPEQGAVKIIDPRQEMALFESYERRIDQINAVLNSYGISSIEEAEKITKDAGLDVYDQVKKIQPICFENACWAYTVGAAIAIKKGCRRAADAAAAIGEGLQAFCIPGSVADHRKVGLGHGNLGKMLLEEETECFCFLAGHESFAAAEGAIGIAEKANKVRQKPLRVILNGLGKDAAQIISRINGFTFVETQYDYKAAKLNIVSEHAYSDGLRATVKCYGADDVQEGVAIMHHENVGVSITGNSTNPTRFQHPVAGTYKKECIEQGKKYFSVASGGGTGRTLHPDNMAAGPASYGMTDTMGRMHSDAQFAGSSSVPAHVEMMGLIGMGNNPMVGATVAVAVSVQEAAEAGKFMAMKRANGDGSVFKLTGKRRKPWAARITIGWRLDPASGKLTQEYQLIGTFATRIEAETALNDFLQNPYDINAHKLTFSEVYDLWSKEYYATLKNDSSARSYRAAYKYCEPIFNVRMRDLRVSHMQGVINDAVVGDATKSRMKSLFNLMYKYCMIHEIVDKDYSALFVQKAGKRDKTKRVPFKNSEVQRLWKIRSFGVTDMILFSMYTGFRPSEVLLIETVNVDLVRWRIKGGIKTDAGIDRSVPVHPLIRQLVQDHYNPDSKYLFPNETGGFMTYDQYRGRFKKVMRYLGISHTPHEPRHTFISCAKHFKVNENLLKAIVGHKIRDITEAVYTHRAYSDYEEAVATISYDGEDIEFESIDAEWDMEKKKSLIKGLSFSPSRALGISQAKVKVAKATGIPTNKAGRQRKAGKMLGLMKKFLLYFFGICCVVSSVVGFIQYGILNGVTCLIIGVVLISLARQPSDPAAVDSPEAVQPQSQPQRTKTITFDVAGVTFNNESGRLRSRQTILKKISFCDPPFDSGYAARLERYLYNDEPAYYVYVNDYIVGNVPKGFIPYLEKNAGRPYIVEYFKVHGGGKKKYYGAEMRIKYTDIEGEEMTIQTEKKIKENIQKNLVFYRKKLKITQRQLADYLETGVSTVSGWERGAYTPDIDTLFAICKLFHIGLNDMCGISANNSPLTDDENDLLNTYKILNDAGRQKLLERAVELRDLGYVKGDAEKMAMANKTMGNTLKTYMKRHGIKQQFVSDKAGIRPQILGAMLNEKRKIEVTEYYEICKAMGANPDAIAAEAGIWEQDKAAQLVMKYGKELIRELEAEIERYENQMSRRWDRINNGETDQEDCFVSMRVEERGRDLAKDKIKLIQNGGFDWFVEYATLDGVLVNAKWCQCRSFTGYGKTSKLRVEMPDGTVKWTQATTEKGLARIGIKRVLCKRPAWFRFSSGGSGMYGIYTGQYTTFPSDKNYATGEDASEEPVEMKDYTPTKGEMLQSKGRYSLDCINDVTCGSVWGTITTLENIDEAVQQRGAFRAKIEFYGILEEYNGNRYAFFKDLGRETEDNYFVELTMVIDNIVFSEEMSAAALTVAMLPYLSCEYEKAYNTADPLEIAVRIYNDILDRFSGVNSQKMTQYTVKYDLTEKEEEALRELLPCYQQYIAKDGSRPFEKYTLADVFQSLMYIGSRHTIWRHIKEEQFRQNLIDIDQLIDDKYLTIAERNAHTDEGSEDTMKERTMTFSINGDFITRLAREKCHYEGKMEYAMTLLESCLESDEITDNERKGLAFAILDGRAEVTGTYPGDDYRFHYLDQRDEQWNIARTLEKLHEKAEQAEKELHQVEEKLGFIAGGYMSSWDRREAQKQYREETGEKLFADMEEERESTESTLLDSFIKRMKSESDDDYGWLEPNGTFHPVEFGMHEKWATDHVAEFYGDEHKEKRQEARKYISRGDFLADRGWVLLHNPSQGIAIPTTSPGKRYTKAQKEFLYQYFIDRNCEKEANEIWEDMAAGKIKVTEAAALLHVSDQFVRIGMQRGILPIGTALKMSTKWTYQISEKLLAEYSGADVAAELEQIRSGIMEKKIFYTLKQQKGVKGVRKECGYELEIATRKFYGYVSADQTVYIIDPRNGIAIMSCDTALICDDEILREEKEIECIKYVAKRAIEKGIIERLKEKEKKKSYKLTIKAFKTFVKAEILLEKQNAEVLKELAKEENAMTTIDDILQLIDPSDRLRIVKDGKDLFVGYVGVYKLDSEKQLQDTFGSCEVKRFRAVPELRHKDWKKRGLASPLKPEETPDYYFADLQSTLYYTIHIMAVWEKEGWGTTNDCLQMVVDNYRTQGTTDRHSVNALESYLRRLTPPAFKVMFEHSRTTTAQMIADVLGVDKLLDVYNVFMQEPGNTENARELRQRIEKLEQQNRNLANDLQQQRETTLEQEEEYSKETVIWRETEESLQEQVRTATEQLEESKLEIVRLKAEIYDILSKNGDIMSKNNAAGIVGIITTKPRVVMDAPTWAQKVYEAVLEYRRPSGTKDKFFVQFPGQAAGTKKALLNIKKGKEVLIGGEVRTQNMDNPEPHEPRVKICIYAKVIAVNDPPADPQNEVKLCGHICKDPRVATARFGKIAVTSFIVAVNSHHGADYIPCVCWRNVAEAAAKLKIGAYVEITGRMQSREYKKKMPDGKPPYLATTHEVSVTQLGFAEDTDEQETEGSEKTCMLRRPTVGIALDEMSRRQTEEFMRFISGMSVKKDSIFIHAARGRIKEQEEAMQQFAKLAKEARHAEDRESVFAKTGLAAGFANGILRAGLITKDELAQLVDMLNKAGSDRLAELDAKRKSVFHRIFKGAVLMSAAEYRKIIAVDFDGTLAVTQFPTIIEPKWNEIAICKALKKQGCILILWTCRCGEDLTAAVEWCKEHGLEFDYINENVPENVEKWGNDSRKIFAHEYIDDKATNPVKERAWIRRLRKAKAEKLIPAVIAVVSIFAAYGVVAALNLLFMAKGESKTGNCRFCGQSSIIEGGADMTAPQLEEAATMQCTCEKAMAYQETANRRTVAKQRAEELFGKDAGEYAQPDDTLAYILAGIDQVCDKKAKQIIITIKTSLRARIMQMAKDKIKIVRETSNTDEFTQMPYKHEICRAGKTKQHTFYYAVRTDTKEGSRRQKENKTCEAQKKVNSRQAVKKLTWILNANYDGTSLYITWEYTKENRPATKEALRTDVDKLLRNIRRIYKKAGKEAKIVWVPEVGERGAVHIHMTLNAIDTQLLKKCWDKGWITIKPMDDNGQYRRLAEYFVKYSEKTMKTCEGFTGRRYNSSKNLVIPEPQKKTVSSRNAFNHIVKVPSGWYLDKDSIREAWHEVTGFMYFTYTLIYDGRYRKQDESESYLLNLETGEVEITEKLQKAAGRKMGLNTGYLKAARTEEGNEQYTPFYAVDPITKYIPKTKKIWCPFDCEWSAYFQTFKRGGWQVERSSIDDGQDFFTYQPEDFDVIVSNPPYTQKDRVIERLYELEKPFAVLLPLNSLQGVGRYRYFKNGIQILTFDKRIGFHNAESMEEYKKGSSFATAYFCRDILPRDLILEELREYRKPLKEGEKSNDRTTAERFMKAKYKAGRPEDNLTVGKKYDVEDVRCKKGFEASEVYLKNDKQQKCWYSVELFTMYAESALPLKMGAADAALGAAALATPEQPEVAIKTAFVDSESIQQALSRQIAKKMRDTGLMYGAMYGNLKRGEDTEQMGVIDWANWNLQRFPELKMLYHVPNGGKRNPAEAARFKAMGVKAGVPDLCLPVPMNGYAGLYIEMKYGNNKPTAAQKEWIKNLKEYGYKVTVCYGGTEATAELEAYLQGSRTILIDPKNENCKPQKRIEIYCSSEDTENIRSALCMAAAKGSCVFGSDFVPECCIDSPNAETHEDCCACVLQNVAFAEYDMKTIAVINLKGGVAKTTTAANMATLLGTKYQKNVLLIDNDPQGNASQFFDCYRKDEKCGAAKILDRERPGIFADVAAGVDLINANMTLLEADNELRTSEDRQDNRFAEYMEKAASIYDYCIIDNPPAILMCTINALCAADEVIIPVRLDNWSIDGVDVITEQIEALKALNSNLKIAGILLTDYKKSIENETAEEWLRKNCKYNVFSRRIRHSEKAVAATYYKQPLETYSPRSAAATDYRKFMEEYTGTKKAMAGFDITKILNKQTTAQTENAVTEDFEEIKLDYGKIVITGKNKYSMNDIEDLAAGIEMAGGLLDPLILGRVNGEYKLAGGHRRYAAVDLLVKDGKEEYREVPCKYKDMTETEFRLYMLIGNTFNRHYTDYDKMVEAEEWKEVLTQAKEEGSFLPEKGVRVRDYIAKIMKTSAAVVGDWNRINNNGTDALKEQFEAGTIGVTAAAAASSLSEEEQNDIAERAAAGEDIKGTEIKEMIERKKAAAAAPEEDTEPEEATGEQEEKTEEEHTKATLAQMQPSASDTDTTEEEKENARRLHALKMLEKYYIYLNEDDLRCLEAMLQDCKRRKMEYGALDCGSTIMNGIEVTVNINLNGEKVAGITTGEQAAETLPPGDVGREVTQEEEQRFAVASDLANVCEYLEDSEVIKIRLIVNKAQARKDRAEKGDEKMRHGLIQEVTEAIENELSAANKAFPGFNSTHEGYAVILEEAQETEDEMRKTGMNLNALWQATRMNQSPKQIREIAEAIRESAQAMAAEAIQTAAMAEKLIQYTERQEEMNAAAVIAIAAAAFLYVEAAIGTGYYMYLITRKKTKQDATKEERKQLTRYSIIAGVAFPVTFAILFAARAAERKMNKVDLTGRLTKDPQSRWTNGQESQEQICIVRFTLAVNRRKKDAGADFISCVAFGKSAESLEKYCKKGTKLEISGRIQTGSYTNKDGGKVYTTDVIVEEWEFAESKAAAGQQGNQQAPAQPETDANGFMNIPEGIDEELPFSMTITEDQLEAWIKQLIKENKLYKFYKWHEWRELSAQVMKENNYECQFCKKKGIHTRARSVHHVQWVRKHPRLAMSRTYTYNGVVYQNLIPLCEACHNEQHPDKRITSEKKHFTNEERWMTIPPVKKNQIFAAGRETGQGVDKTDSRAHVMGVVYMADERKPEVKKITRSKPYKEIEKDLRDQLEANGTYGKFFEDMIADYMAMYVTKTLLIADIQKRGTIVEYNNGGGQSGYKKNEAVDMFNKTNAQMLKLLSELGLKANATIGGGDFDDELMTNYRDVPELQKYIDLVENEGKNGVKKCCKWQKKLIKFVKKCFENENLTIDTEQLKKYMGLQKYFDFELFEWEQFVFTLHCCVFREDGLPRFPDLLIFVARGAGKNGYLAFEDFAMISPYSNLQQYDVDICATAEEQARTSFDDIYNVLEKHRKKLIKFFRWTKSEIQCRKTRSKIKYRTNNAKSKDGLRSGKVDFDEVHAYESYDNIKVFTTALGKKPHPRRTYITTNGDVNDGVLDDLIEKAKKILDGEIEDNGFLPFICMLDDPEEVHVEENWHKPNPSLQYLPNLLEETRKEYKEWLENRSSSSDFMTKRMNWRQGNGEVELTSWDNILATKQEVEPPKAREIAVAGIDYTKINDFASAGVLTKRGEKVVWKQKTWVCLKSADLPRIKYPLNEAEEAGELEFVDAPEIAPELIAEWIGEQMGFYSIPMLALDDYRFALMKQALARYGFTYENKNIKLVRPSDKIKVEPIIDSGFRNHNIVYGDSSIMRWYTNNTKKVKSKKYGNYEYQKIEAKSRKTDGFFAFVAAMTQHELIPEQQGSADVLPLFTMMNMNDYFLRAFGRESTINVTTQIEEELTEVFFKELATACAINMIASLISKCEFRTFIKGIPEKKGEYYLWNYEPNQNQNAGDFWQQFVTNLLYDNAALIVEVGGKLYVADSFTRTHYSFREDVFNNITIGDLTMQRSMLSHEVIYLELDNINARRRLEGSYTAYGQTVAKAIRSVLRAGAQKGILNIDAQTAAQPDFTTKLQTLITDRFKPFYDTDSAVLPLQTGYTYTDVTKQTTAPTPADLNERINYEFEMAGRAYKIPKALMLGDVSDVEKITKNFLTFAIDPICQRIGSEVTRKKYGEKQFAKGNYMDVNTNCIQHIDIFEQATNSDKLLSSGLYCIDELRVKLGDTALKTDWSQKHYITKNYAEAEKMEHLGDVKGGEMKNQKAHYSLRQEAGSNVHKLYIYDDVTKYGDFDWWTWNYSESETSAQHFRKVLEEIPETDVIEVHINSNGGDVGEGVAIYNLLKQKKCKELVAYVDGFAWSVASVILQAADRRVMGLGTSLLIHNMWTTVSGNADQLRKAADDLDTLMEGNRKIYMERVNITEEELESMMDAETYLTAEQAVEQGFADEVSSKAGEEAGTVMQQLQTQLLQLRTEMLNQKAIKTQMLEFCKQASKKNEDSAEDEDEDDEASDGSDEDNSEDNDDEDNNDDKKNQKNNSDPKQSTNKMAALLAKAAAKNLEKRMKNKDIEQLSREQLAQKFNEALKTEDTEQVAQAMAEMAAGIEEEILQRAKDVAAVEQLDAQAMAARGLRQLTSEEKKYYEAVIGAMKSENPKQALASIDVTMPKTIIEDVYDSLKLEHPLLAKIDFKNTSYITEWIMNKNGKQKAIWGDITAEITKELEGSFEKLDMLMYSLTAFLPVAKSMLDLGATWLDSYVREVLKDAIYVGLEEGIVCGTGVKMPIGMNRDIEAAHGDGESYVKKTAIKVTKFTPETYGGLVGKLAVTRNGRPRTVASLIMLVSPEDYWKKVMPATTVQRPDGTFANNVLPYPTEIIQTEALTKGEAILGIAEQYFAGIGTGKEGTIEYDDSVRFLKRERVYAAFLYGNGRPKDNNAFLLLDINELQPAAYTVVTGTDTVEVEKTTWTEEELNAMTVEKIKGLAAYKGYAITKTAKAEVIAEFLAAQTAATAMADETTKTPDEQLLEDILNELDMTLADESMQKKIKDIMQRGKARIEKIGGKQLDFAENQQARELLFSYCRYGRSNAIEQFEHDFSSQLTGFALDEALATLESGAENESKVMKAKFEEFNDGTARICTVNNDGLLVDKYEKPLRFGEENVSMKRHYAAQAADTRVDKVIHVQQRKDLKAHEVAVIGEDQFDIEKIDQINDTMPPITKLSLIEYEKHRRKDFAMNVGATKKIRPDQLTGTLAESLLEWERENEERFFRAIDDAADACNETAGQYLTPGHGYKTGEYKRHFAIERQLTGRHSYSATWHVEAPHYRLTHLLENGHLTRDGTKRTKAVKHIKYGRQIAEQVLDEKMKGLWEMTDIKTYLETETELPVADTAFDKPQKLPFVAFIDKTAQDGDDFHARIVEHNLTVEFYAERLDNENEGKLEKAFEKMNWKFEKERQWLPDEKMFETIFTMNFMEKRMKGSKEKVVLGSGKVYTMLYTGTLPETFTEILKKVMTEENHTGWIKNGASVEYKPTMTTEKDDLGMVVKEILTDEEATFKTGLFTWNANSLAKLSATAVVTTEDGENGKKYRRLKVGGTANDDGKQYVILFVHEDPVEGNCYLLIVGRNTAGFTITFAADSATVIDAEFNCKPHDSRGTLIEFVEEYEEEYQNEYTSEELNALTVDQIKTIAAAKGYTITKTTKTEIITEFLAAQTAAKGMDLSVNFQKVKRNYMTLTFDDPKSEKGVKVIVVGMPKKKVFDALMDMQDTITEREEAQNAKERSGANRRTIEELYTLTAKILSNNLNGEAISKDWVEENMDIEDMKAFFAQYVRFVKIPDTDPNMNEIEELEYIDYLQYRRDAFIHSCNHSEEGREYLENARTLMQTEPDRKRLRDLFGKPRMGKALKGITVEINGSTENLVKALEKPNAEAASLQKELKGVNSLLKLDPKNTELLEQKQVLLKQAVQQTEEKMKLLTEAEKQMAAAGKDVNDDAYRDLQREIAATAQKLDSLKSQISTFDKMKTGAQNFGKSLANIAQKIPGVNKLTTAFGNAKQKITETVKESKTVKTIGTAVDGARQKVEAFKNAHQAVQKVADAFGKAKAAAGDLAGKMPSVTQVVQAAGSAATTAAKGGWSVLTTTVGGTIKAFTTFSAAAATAMVAITKGAVENYGDYEQLVGGVETLFGAGGQSLSEYAKGVGKTTTEAKDEYNNLIKAQEAVIEKANGAYKTAGMSANDYMETVTSMSAALIQSLDGDTVAAAEKADMAITDMSDNANKMGSDIESIKNAYSGFAKANYTMLDNLKLGYGGTKEEMQRLLDDATKISGVKYDISQYGDIVDAIHVVQTEMGITGTTAKEAATTIQGSIASAKAAWTNLQTGLADENADLDALVGELVDSVVTVIDNIAPRVMAAVPRILQAVPRLITGLSGAAKELAGEAKGLGQSLIEPLTNSFFTLIQTAIEMLPQLLPEVLNAAVMLFTGILQGLNQTIPQLAAILPQLITTITSTITQNLPSIISEGAMILVNLINGITQAIPTLIQSIVDLIPVIVQAIAENLPQIVEAGLNLLVSLITGIVQAIPQLVDMLPTIITTIITVIIQSLPQILDAGVQILTALVNGLIQAIPQLIAMLPTIITTIINVLIQNLPQIISAGIQLIGALISGLIQAIPVLVAAIPQIVTAIFTTFKNVNWGELGSNIISGIKDGVVNAAKNLASAVADAAKSALDAAKEALGIHSPSRAFRDQVGKQMAAGQLIGYEEGMEDNADAFAKASRKSVPTTIDGYIAAGSGSNRQTAQQGQQGGFTQNVNIYSPRELSPSETARQTRNATRQMVLKLKPTMKSVKCVNENGLSAVFAYDHDSTEYFLVSLDGVYSIKNTVNTSQNATTDGSSYSGEALQQRNIVITANIRRNYRENRDFLSRVFKVHSQGVFYHTEDGETRKIEYYVESLEIEEKGIIRAATISLICPDPYFKDNTATHIEMASWESGFEFAVEIPEAGMEFGSRSKETIKVVDNDGTTSIGIQMTIIAEDTVVNPSIMNVTTGETLKLLCTMLPDDEIVITTEQGNIDVVLRRNGKEYDYNYTVDEDNEGYVQLETGRNYINYTADSGGNYMNVNFDFENRYVMPMEQTKATAQASAAVLMRQEKQVKIYDQALQRKGVIDVYRSLIWTRKYKEAGTVELHAALTEKNLELLQKGNILTMTGSVESAFVEGMAVDDYSNEITATGRMLSSGLSRRGIKTVIAFTSGTYEDAMRLLVDKAAISVTSPLPLLQLGEKKGIGEAVTFQVSYKDLYTYLTKLSACSNLGFRVRADFKNKVYYFEVYEGKDHTESQTGNKRVTFSEVYKNINKATFTTNDQLYKTHAIVCGDGEGTARTVAEATIDEQATGWNRRELMVDARDISRTDMTTQQYTAALIQRGTEKLAECGIVECLEAATLPFVNFSYKKDYDLGDIVTVRKKAWGIEMDKRITEIQEIYENGGFSIVPTFGDPLPDSVDLSDNMAEQYSFFNSKDNDRVYNARHWADYFYPLFKSGVFNGGLAVAANDNMTATIAPGYAWIDGYAYHLTEPLTVDLETASGNMNRIDNIVVQLDLSNRWIKALTVTGNYYSGAATAKEPEITATIHDLIIARVNVAAGTTAITQDMIEDTRMNDELCGWVCGAVQQISFAQITAQFDAFFAAYKANVTAEYAAYLQNIASLETQAQTRYDSMDEEFTAYEQQQKAAFEAWVESIKNILDGNAAGNLLLLINEKMQKVTVGAAGGVAYLEIEDGLNLALAGFTACDTTFNTDGTITQTDKIGNVKTTTFVSKQKINEEYVLASGDRYTKTTTFGSNGITERIVKNEMSDFVAAKYILDNMKNGIAPDNVEAINVMAMDGGAKIRVRPPKDTVIDNQLICTVKGYRLLIKEGAAPETEDDGTLIEEVTQLDKYKANALLHSGLVNGTTYYVAAFPFNDYGLFNRNAANVAKVVPQAYTLFGYYDDLTDSNPETKIHYIEMNAGFEPMRVVADNTGGWTEGTWSEENCWILRGNRPYMVKNDGTIDYELCHTDYSKKIDGVTASDVSNAAYAGNAMATIPLIWVKRYTEDNKQYHLFCDTQLDDDFTAGAFTRADGSIEPYTFYPMFAGSLISNKLRSIAGQGQMNSQTGTNEITYAKNNGALWNTGYFSIVQLRWELETLFTRSTNKQDACGYGNYTGGTQASNLSRTGTLLTGGRFYGYGSKVNKPRKFMHCEQQAGAWERINGLLYVGGKYYVKESEPYNETGDGYINTGLSMSGTSGGYIKTQVMTKQGCFPTELGGSSDTYYCCGGWYNAGQVDHAVVDGRCADSLLCGGAVYVGDLVSSAYWGVSARPYCKTPTTATASDIEAMKTYKNLYEKIISEENLKKAFYAAAKGKKNRRDVRQILNNIDEHVCILHEILKKEEFRPAHHIPQEINDGFKQKKRRIIKPYYKYEQVVHHAIIQILAPKPEELVKDPTLKKVLNRGAYEFSCGSIKGRGAHYGKKYIERWIRNDRKNTKYVLKIDVRHFFESIPHDRLKAKLRRVIADEKTLRLLDIIIDAVPEGLPLGYYTSQWLANFYLQDLDHYIKQEIWKPEKEKKTAQYIARTKRKGKTAGKVPKYACGVKYGVRYVDDIVCFGANKRDLKVALERIEAFCEEKLGLIIKDTKQIFPLSKEYEVETIDRHGKKKIVTREIGRALDFMGFLFRRTRTTIRKAILYRITRKARKISKKQKINWLDASSMISRMGYFKHTNSYNVFACWISPFINIKQLKKKVSKHGKKGSANYAAAMGTGRIKVRRNITRETRTTETGKQKVWVYEYADMTLAQYEEYAAEVAQLDTPLARQMQDNATAQLEAVAALYEEVIKTADNQRAIMEGIAEIYEQGENKVMTSVYVKLVIVGSREISSVPAKHIVEVAKRVIEKGAEDGETYITIDDVPEKYKEAVIEALKADGYDENGESMMTNYAQGFMDKYNAIAGAAVAILTAVFGIYWYVFAAFLLLNVIDWLTGWYKSYKKKEESSKTGLIGIVKKLGYWAIILVAFIISGVFVHLGNDVLGINLAFLTMIGWWVVAMLIVNEARSILENLVECGYNVPPVLVKGLAVTEKIMNAKQEGEFGNDSTENQKRDMTVQRTRRGIDVSDNQKVIDWGKVKAAGVAFAVLRSVRGSGKTDYQFHNNLAGVRAQGIPFDVYKYSYGTTPEKQKTEAQQVVDLLKSCGVEDCTVWWDMEDKTLRLLGKEKLTALIKVAKVIIEAAGYEFGIYCNVDWYKNVLDPTAFSCRFWVARYPSKKEMQLEDTPNDKYKPQITQELFGWQYSSTGRVDGISTSVDLDLIYEDLEQNEAPKDYSAPYAEPTYTLYRGRLAQKVEYVKWLQWHLIKVGVLKSHTAEGKSNLDGSFGKRTEAALVAFQTAHKETYSTKEPDKKCGKKTRAALIAAVKALMSEVIVRERYLKNGKKVYEYCFELAHEGGKRRRRTKSGFATKREARAAGRQALYEYENVGEVVVDNNISYSDFLDFWIENDCKNTCKEQTIKGYEKKIKLYIKPELGAYRIKSINKDNLQAFITDLYNDGFSVNTVTSIKGLLTKSFNFAVDRNYIPASPAVNLVIPKNKQPDRPTRFKQHIFLEKDQVDKIFERFPKGTSSFIPLKIAYHTGMRPGEVFGLIWDDIDFVNKTITVNRQVQWYAGKRTEEEKKRTNGTSESNGYWYFCEPKYKSYRTIDIDDTLLDILKEEYEKQQRACEYYDEYYSHYYSDFKVTDEILRRNTVFPQNRIGETCTEHEVNFVCRREDGSYVSSRTMQHVSRIVHMQLVITDYDTYSLRHTHGTMLVEQGADIIYVQRRLGHKSAGAKPVRNPEREKPKWEDTITNRMLHWSYTPEQKEEVKKALAAGVPKATILTYFYPEVTVEKMSSYRKKQMSSIKIYENKTFKLNYICLFNYLFISSQMSAKPYFIGSTGMIQYLGEHKLFNEKYIIFILFCIFLIEFKNYFSDKNKEKGYTLVISLMYLGEAILFLMPYENYIVDIMCTLFGIVLILCLILRYKSRKGMIGIAICDDHTDYDVGNEIINTILNYYLSPIKSACKITVRRKNEPFAENSMKDQEYDYFYEDEQDAKYCYPGTNVLKNKLDIRDLDTLHEAERDYSAVRQAELVGQGVTGDFSFKHLCSIHKHLFSDVYSWAGKTRTVDISKGTVFCLVQFIESQFDDLYCKLKKENFLADITDKEEMSERLAYYLGEINMIHPFREGNGRTQRIYIEQLCLNNGRFEIDFTDVSKEEMIAASVRSANASNDMLEELISSCLVEKMTVDRRVSSIESSFKMESMPFDAECRQRVRNVLTKKVSATDAISELNKKYRVSKKQVEGSRVMENHTIVTLKKGEGRTIKAGGAWIFDNEIDTITGTFTNGDIVVVHDFDGYPMGRGFINQNSKIRIRMMTRKADQLIDDSFLRMRVQNAWDYRKQVMAGGNDNVSAAGETDTAGEACVAGIGTTGRPDLNCCRVIFGEADFLPGITVDKYADVLVVECLALGMEQFKVKIVELLKEVLAADGINIRGVYERSDANERKKEGLPKVKGFIGAEFDTNVEIVENAVHYMVDIENGQKTGFFLDQKYNRLAMQRICKGKRVLDCFTHMGTFALNAGIAGASEVTGLDISEYAVKQATENAKRNNLSDTVKFRVANVLDELPRLAADGEKYDVVILDPPAFTKSREATKNAIKGYREINMKGLKLVKDGGFLATCSCSHFMTQELLAKTVKEAAKATHKRLRQVEFRTQGPDHPILWANSANVPESYYLKFFIFQVVDEKMSFLEEYKQKLVSADEAVKIVKSGDWVDYGWCTGTPDALDKALARRTDELKDVNVRGGILLKPLAIFEREDAGEHFTWNSWHMGGYERKLIKRGCSFYSPIRYSELPRYYRDSTTPDDVAMFQVAPMDSHGYFNFGPNASHLGAVCETSKKIIVEVNENMPRCHGGSEANVHISQVSYIVEGDNPAIGELGAGGPATDVDKKVAELIVDQIPNGACLQLGIGGMPNAVGSLIAESDLKDLGVHTEMYVDAFVDIAKAGKITGAKKNIDRYRQAYGFGAGTKKMYDYLDENPELMSAPVSYTNDIKNIAALDNFISINNCVDLDLFGQISSESSGTKHISGAGGQLDFVLGAYMSNGGKSFICCSSTFTDKQGVVHSRIRPTLVEGSVVTDTRANTHYIVTEYGMVNVKGLSTWQKAEAIISVAHPDFRDELIKEAEKMHIWRRSNKMSMTETIKLYDRDAYATEFEADIISCEPNKADDKQFDIILNQTLFFPEEGGQSPDMGILGGYRVVDVQIKKGVITHTVDISANDCCEAEKKAGKQITGNEFEPEKVELAAGVHVHGKIDWQHRFYNMQQHSGEHIFSGIVHRRFGFENVGFHLSDSVVTMDFSGVISPEDIAEVEHEVNVAISKNIPIEVTYPSRDELAQLEYRSKIEIEGQVRIVTVPGYDVCACCAPHVKRTGEIGMLKVMNYQNYKGGVRISILCGFRALEAFRQKCDIISELMGIFTTNQEAIVDNVTKLKAVNQSLKSELGTAKSALLDYKVAELPADTEDAVLFEDGIDTNTARNCVNGLVEKYSGFSAFFTGNDEEGYSFIIGSKNADCNTVATALRNKLGARGGGKPVMVQGSVKAAKSEIEEVLKEVLMNKIYSRLAFTNIKNNKTLYMPYIISGMVMIAMFYVMMFLNNSKGLGKVPGAEILVDIMGLGCGIIAIFSYIFLFYTNSFIIKRRKKEVGIYNILGMEKRHIARVLIIETLTVALAAIVSGIIAGILFSKLMIMFLYRIINIKAQINFTVSTSAVVNTILIFGVLYFLTLIYNLMQVKLANPIELLRGGNVGEKEPKSKWLITIIGLGCLAGGYYIAITTKSPLQVLSLFFVAVLLVIIGTYLLFISGSIVILKALRKNKKFYYNKKHFAPVSGMIYRMKQNAGGLASICVLSTMVLVVVSTTVSMYAGMEGELKQRYPSDISVYSWYKEVPADVNLDDALKEAAADSDKIIADSACNVKDSKSYTYFSWTVFREGTEFKPVLSFDNDISLLYFVTGDEIDEMETGFKERLNKKIPQLDTGSVAVYGTEKFNGDIINLLGKEFKVAAAEKTAVSKDSYMSSMYSGVYYVVVDSKATLAEIFNLNSSLGEGSVPTMLNNEIDYNLYGSSEDKLAVAKALDKHFEENSVKSDVSGFYEESRDANREQIYVLYGGLFFIGIFLGTMFLMVTVMIIFYKQISEGYDDKARYEIMEKVGMSNDEVKKSITSQVRMVFFLPIILAACHLAAAFPLLRRLLVMFNLTDIKLIAICMTATLLVFMVIYYIVFKITSRAYYRIVGNQIMAILEVSNLKKIYTTRFGGNQVQALKNINFSVEEGEYVAIMGESGSGKTTLLNILAALDKPTAGEVLLNGKNLVSLKEKEISAFRREHLGFVFQDFNLLDNFSLKDNIFLPLVLSGVDYRDMEKRLAPIASLLGIEKLLNKYPYEVSGGQKQRAAVARAIITNPELILADEPTGALDSKATDSLLRLFNRINEDGQTILMVTHSTKAASHANRVLFIKDGQVFHQIYRGNLTNDELYVKIQDALMLITTGGEKHEMMEWNFNNETPIYLQIIDRFKMDIANGSLKPGNKVPSVRELALSAGVNPNTMQKALSELERDGYLESRRTSGRFVADMGNQADSLKNDLAHKLCSEFCEGMSKVGFTPEQSLTVYENYLKSLKKEMAERIEIKSLSKNYKSHKVIENMNVTFPGGKIIGILGPNGSGKSTLIKMLAGVLQPNTGQILIDGEPVGVKSKAMVSYLPERTYLNPSKKVSDIIAFFKDFYADFSPERANTMLEKFGVDPQAKIKSLSKGMREKVQIVLVMSRDAKLYLLDEPMGGVDPAARDYILRTIIENYNEDSTILITTHLISDIEKVLDDVVFIRDGGIFLNDSVDNIRTNYKKSVDELFREMFACCMLLKLIKYDFMEQFREHIGLYALVFVSALTEIILDSFEFDLVSVFFWALHSLSVIAMLICSLVIIVLYFRRNLLKDEGYLMNTLPVAPWMLYVSKFLTAFVLFILDLIVAVLTFSIMNHGFAWIKDIIGSMSDEFANAGFTMSPVVMFGSIAVISLLYTISILFFSLTTGYRANGSKDANSVLTFIILYVIGQVANIIVMIFTFFIPLSSKGSITYILTVLNPQEITALINRVVIGALAVSLILTVVYVAGSIYNMTKKLNLEMKEQKLNAYGMTPLTGKHYFVYGLGNFASQLSWTMVSTYLSIFYTDVFGLGVGAVALLMLIAKVWDGINDPMMGTLMERTHTRWGRFRPYIFVGAIFLVIFTILTFTVPGFGGPAKLAYAYITYIGLGMSYTMTNVPYLALPVVMTRDPKEVNKLNAAQMMGMTIGQIVLNLFVLKLVLWFGKGDQAAGYHSTAIVLALIALPMFWAVAYLSKERITVKKEDQGKVSEGLKLVFKNKNLVCAMMYCFFNMFGMLGRISVAVYFYMHCVQNFTFITVFMMMQMIVGTLIMPFTPKIIDKFGKKKTAIISMVIQGTALIILFFGPYENIVFDFVVLIYYGLGYVAGPCGAGMMIDAIDDFDDKYGYRNDGMAFSFQGTTVKIATAIANSLFLVVMGAFGYVGGGEITPHVQTGINVAANLLPGLVFFMGIIPLAIYNLDKPGYMEAVRERLTARDKAKREAAKEAMKVLGISFGRRNQRSDVMVKEALFAAKAAGAEVQFINTVRMDIGHCRACDYCSRMRDKGETEIHCCMKDDYHILEEACLEADGIIIGAPVYAVGIVGQFKNFVDRFGPSHDRAALIEENKKRKAEGKPELDPRYFKDRYTGFISVGGAETHNWVSLGLPMLDLFSFSFCMKCVGHVDAYDQGRTGHPLFDPALMSKCAELGKAVAESLGKPYDEVDTWVGEEGVCPVCHNPLLSMNGTTHVECPICGIWGDLKVDGEKVKVEWSEKEIARARNTNIGIYEHYNEIQNMIKVCVPKLVANKDTLPKMMEKYVNFEETIANMYEKFGGTRMCWGVEIMENDRKLIQFHFITNAEVSTHYHQNPEVFYVLTGELKVQIDETTFLMKQGDIILINANKRHTMNGNEELLGARFEIDFHLLAEYMESMQLLFWCNSVADKNAAYADLREVFDHILSRYFEKDEKSALDLQALYFQAAHILTSNFLVKADDTRLNMDDSQDRQRVRRIQNYIQANYQSQISLNNLSDQLYLSNAYLSKYVKKHLGLTFMEYLNNVRLFHAVDELLYTKKNMTHIALDNGFPTSAAFTKAFRDIYGEAPSEYRRKMREQQEPENPEHGLSEEESGRIKKYLIFKEQHNEPVVKNQKVCTVDVQQTGKLLTDCHKAICVGDAYTVLQSNVQSQLRDLQKAADIKYARMWNIFSREECYNGKKGCNFRKIDQILDFLLENHMKPYLELGHKEVLLNYSAEKFLKENEEIENYEVQVYEYIFREFCTHLVNRYGIDEIETWYFEYYNFSNTGATESTGMTEEEGLYYQYFATIYRILKGISPAIKVGGAGFILGYGTLGCRSILPIWKKKNLMPDFLSVYSYQYVAIDDNDKRYGRKSIDIDYMRNQTEILREVIKETGFQVPELHISEWNFTISNRNVLNDSCNQGAYVLKNCIDMNGEVDLMAYWHALDSYSDYYDADNVLNGDSGMISRDGIRKPSFYAYVFMNRLLPNVIKKDENSIITTNGRDRYVIACHNFKKLSAQYVFSEEEKITVETIDNYMENDESLKLQFRLENVKDGDYLVKIHMVNKENGSAQDIWKRLQYSKNLARDEMQYLEKSAIPRMEMKNVHVEGGVLELENVLMAQEIRLLDIQYRYSLKMLRYDVKVILNTEVNKEYVNTFDPDAEVDEFCETVDESYIIGDCKQVGLIYHAVNQAYFTAMQIMIRVTVWYEYVQEAGEFNEEFLPKDMSVEEKARLKKRVADVAAKIKEVYPKGVMGTVAEHLESCEDMQVTSVRMNMPEYGLPDDLLNHTDVLIWWAHVAHDRIPDCLVEKIKDRVLKGMGFIPLHSAHPSKPMKALLGTSGSLKWREGDFCRVWNTNPTHPIAQGIPESFELKEEEMYGEFFDIPKPDDVVFLSWYRGGEVFRSGCTWQRGYGKIFYFQPGHETNPSYHNPYVLKVIENAVRWAAPVMWRENLECPNIVESPESKYLKKMSALENAKKLSSEQVLEKIADLDIQEYGLCAQKLSERLEAAVAESKEEGKESGIVCALNNADIDGVLLELLKSEPENVMEGIAIAAYAIETENKILYVPEYAAELIESEAVKTAAEKYGVKLAADLVDVRANEGCALVHIVTVTNLAEAFSEPADSYEAGSYVSINGTALKKVACNTKIAELTDLNSAKALQIGYEYYTAEEAEELTVASAENGVIRVLSEKDCIVTETEKRLTASRKQSCGKCVFCREGLLQLQYMQKEVKDGKGKAEFIDMTKEIGEAMTYSTPCSMGQNSSRIALTAVEKFAGEYEAHIKKKNCPAGVCFSTETIYIDPKLCDGCGECMDVCPKDCIEGKSGYIHMIDEFDCDGCGKCMGVCEVEAIIKTSGKVPKLPNRLTKVGRFKKRMAVITIDGIKLDVPENKNVLDCALENGIYIPHLCHHKDLSPLGSCRMCVVEVEGQEGVTTSCTLKAKDGMVIKTKTAELERLRMLALELLLTGHPEDCSTCPKYGNCELQMLIQYIGPKTGRLKMRTKGFRPQEDNPLIIHDMNRCVLCGRCVRACNELRGVKVLQYQKKDMETYVGTVHNKLLKDADCRFCGACAEVCPTGTIRDKLMNSEVKREDAIVPCRHACPAHTDIPRYIRHVKNGEYDEAVAVIREKVPFPKALGYICTHVCELECKRKEVNEAMSIRDIKRYAADHDTGSYWKGKGKQLADTGKKVCVVGGGPAGLTAAYYLRKQGHEVTLKEALPTVGGMMAYGIPSYRLPREIIADEANVIVEQGVKIEVNTKVEKPAELLNEYDAVLMTIGGHKGVRLPMEGSELPGTILNADFLRNASMGNETGIGKRIIVLGGGNVAFDCARTAKRLGAEEIHLACLEARDAMTADEEEITQAQEEGIFVHPAQTFERITGTDAVTGVDFMNVKSFTFDENRRAIIEKEEGSEHHIDADTVIFAVGQRPDITEEAGLELGRGNSIVVKNMDNDKTTSVEGIFAAGDAIYGTKSVIMAIESGRQAASQIDKYLGGDGDISEVLAPVQKADPYIGQCPGFGYQERKHTQVDAPEKRSDNFNLFDHGICDSDICAEAGRCLQCDLRLQISRPSLWGDFVEQKEAEMKQYGFGVDIGGTTCKIGLFDMNGTILEKWEIKTNTENHGAAILDDVAAAVLGKLDEKNISKEEVQGIGLGVPGPVGPDGTVFKCVNLGWDVLNVEKELSEKTGIFVKVGNDANVAALGEMWQGGGKGHDNVVMITLGTGVGGGIIINGKIVAGSHGAGGEIGHIKMRDGETATCGCGGHGCLEQYASATGIVRMAKQKLEEETRETTLTSYEELTAKDVFDEAKAGDAVASELVDVLCNMLGTAMANIAAVADPEIFVIGGGVSRAGAILVDGIKEHYAAKAFHACAETEISLATLGNDAGMYGCVRLLFMKTKNRIAVSVFITAFAFGLNITGVLPILGILNEKYQQYGTGMVQQLQTMPYLMLIVGSLLVGWLTTRISKKKIVITGLIVIGICGMLPFFLENFLILVMTRLLIGFGFGIVGPMNTAIITEFFPPEERASYMGLHVVGMGIGTMIGNLIGGILAGIGYRSFYLVYLIAFLAAAGIKIVLIETPPVMDETSSDMKLNKMVYVISLASFVHTLFINAYNTNIGIYILQNITDNPSVTGVVTAVNSAFALLVGMFFGKISGVLKEYTLAFSILAAAAGYGVILFVPGMAGVYVASALCGVSLSCFMAMTSYLISVSVEKEAVAKASGMFSIIGGIGGLVAPIVLGNIATYVLGGNHPVNQFTIAFVGMLMFGIVVTISGRKMKEKNQMKDTVIDIQNRRSVKEYKPEQITDEELMAVLNAGMNAPSGGNKQSPIFIAVQNPEWIKKLCKLNAEIAGAPEGFDVFYGAPTIILVLAEKGVGNPVEDGSLCLGNMFNAAYALGLGSRWINRIRETFETELGKELLKEAGYEGEYIGVGSCILGYPANGFPEPIERKADYYKIIRMANYETQIVVIAAGPSGLSAAVQAAEDGAEVIVLEKAAAVGGAANMGMGPLGIGTKYQKQQMEDITVEKAFNMFMEYTHYNVDARLVKRYFEQSGETIEWLEDMGVEFEGAYRYFPKSEPTWHIVKTDQGIGPRAASFMNKALYSRAQELGVKVLLETPAKKIVMEDGKVAGVLATDKDGNEIEITCKAAIICTGGAGCNPKLIKDETGYKHGEDMFNFAIPGIMGDGLRMAWESGADKLPVRIEQAAAIEGVDDLPGSVGNIMGQPNLLVNLQGKRVMNEDHMQNATYLSNVVSHQKGRVCISIVDSSIAKYYMRNGVDNVSMVRPNPDVSDFADAIKMAKENGNEGLYIADSIEELAEKAGIDVDNLVDTVEEYNDFCDSVDEEFFKDKRYLRPITKAPFYGARIRPGGYGTVGGIRINENCEACDKEFEPVPGLYAAGADACNIYDDSYMFLLPGNSMGFAVNTGRIAGMSAAEYVEDEDMEKMKLGIVGFGFMGHCDADMMATFDDIDLVAVADTNPEQLKDAPEGVETYANIDEMLANADINVVMVSTPNPSHPEMVKKAAAAKKHVICEKPAAMSVAEYDEMVAACEENGVIFTVHQQRRWDKDYRIMKEVYDKSMVGDMYIIKSQLYGVNGNMHDWHIYPEMGGGMLYDWGVHLIDQMLDMVKSKIVSLYADVQNVINENVDDYFKIIMKFENGVTAEIELGTYYLTPKRAWFIGGNKGSALIDGFAGEGKIVRTAHLLENVPGKITMTAAGPTRSFGPPEPGLLYEEPLPEVNVDHRNYFEHFLKAFNGEEDIIIKPEQVRRVLCVMDAVRESAKTGKAIAFEEMSYDIKRSVSLYSYQDEYYDKKLDLEGCLRETAKTGATGVELLAEQMIRRFPLPIETEEFRDQWFGWMKKYNLEPSCYDAFLENHIYDNRMLTLSEQINMMKRDIRLASLLGFKNLRTLVSTPMDVIEGSLEYAEQMNVKIGLEVHAPFSLNSGWADGYMEMIHRTGTKYFGFIPDMGIFCKNIPDVVRDKARRHGASEECIKIVDDAYAQRIAKGFTKIKYDLDLGKANMEYRMQNGMKEMMDAVQAAGGGPADMEYAGSSFTYSWSEPQDIIDNIDYIFHTHAKFYNVSEDYVETAVAIPEVVEAFKKAGYKGYLSSEYEGGEHLRADMEVDSIEQVRRHQEAMRRAIEGMAGRQIYNPEGFKNIEKDGSLTGFEFQFKAQYYRGITLSIVRDIKVNIDGEDIERENVRFTVNGETFTLEEMRTVIDSDYRWEFGDYATVSVMKEGGLAKGNHHIKAVQIIDPSYMPFQIEAVCETDFVIEMGKLRIAIVGCGGIANQKHMPSIKTQADKAEMVAFCDIIPERAEKAAKEYGVEGAKVYTDYKEMLADTSIEIDVVHVCTPNVAHCPITVAAFEAGKHVMCEKPMAHNTEDARKMIEAWKKSGKKFTIGYQNRLRDDTQTLHASCEAGELGEIYFAKAHALRRRAVPTWGVFPNKALQGGGPLIDIGTHALDITLWMMNNYEPESVSGQVFYKLGRQDDGPEGNVFGPWDPKTFEVEDSAFGLVKMKNGATIYLEASWALNILKSMEASTTLCGTKGGAEIHHGGSYPQDELIYNTVEHNQLMEKTISPAGVVDFFEGGAAAEAVREQEQWLNAIINDTDPLVKPEQAFVVTQILEGIYKSAETGKEVFFDMKLGFVSAILDTWNYEEMMDFASDHGFECVEVACWPQGKAERRYAGVTHIDVDKVLEDEEYAKHILDYSKEKNVEISTLAYYPNTMDGNQEKREAAVAHLKNVIRASHKLGVNMVSTFIGRDQTKTVEENLELVKEVWPSIIKLAEENDVKVAIENCPMLFGPDQWPGGQNLMTTPKIWRQVFDILKSDNLGINYDPSHFVWQMIDYIKPIYEFKDKIFHVHYKDIKVYPDRLNDCGIMAYPLDFMSPKLPGLGDVDWSKYVSALTDIGYDGCTCIEVEDRAFEGSKEKVEDSLILSRRYLKQFVIMLFFDGDGKAYIMGTGDVWDNGACQKLSSEYMQPEMVWTVRTGRIMEIMRTMMDFEFDTKKVQNTHFHQDLEILYVLDGGLEIQIESEKYELGKGDFLLINANKRHSIRETEEELLTASFRINFSMLAEYLGTNQILFWCNTTADKNEAYEQLRKILDRVLNRFYDKEGEGALYLNSIYYEALYVLNSYFRIKADDSRLKDDVTPDNSRVFEIQNYVQANYQKQISLNDLAKKLYLSNAYLSKYIKKRFGLSFLEYVNNIRLFHAVDEMLYTDKKITRIALDNGFPTTASFNKVFKEVYNMTPSGYRTSVRQKTKEEVQDTESKEQIEQRVKKYLAGNTAPQDEVAAKNLDLFTVDAKETTELKKNWNAIINIGKVDALLDSEMQQQVLIMKQELGFRYVRVWNIFVQDMYEEKDGSWHYNFSRVDRGLDFLVENQLKPYIELSFKPIHVSYTLYSTLTEKENDIIFHDRDSYDKVMNDFASHLINRYGMDEVESWYFELWKDDRLNMMDEKGWYFDCFEIGYHALKRISDRIKVGGAGFALGYDRYQYHQLIQNWKKQKVKPDFISMYSYSYLLIQQDSMYFGKRSLDNNFVKNQTDIFKQVLQEEEFMAEELHITEWNYTISNRNCISDSCAHGAYVMKTCIESIGNVDKMGYWHGSDLHTEYYDTEAVLYGDNGLLTRDGIKKPSFYAFHFMNFLQSQLLGKTENAVLSTDGRGTYTIVCHNCKRFNYRYTMKEEKDIRIEDLEELYEDTDAVHLKFCINHVENGDYIMRVFYVNSENGSVQDVWGDMDYLKNLSKGEVEYIRRGAMPKVEMRKIHVEDGVLRVDTKLMAHEIKALDIHYQYMMMKQFLRKTMKNVAAYVELFLSAVLVFVIVVLIIKLIGQSFFDIWHDKIELEYYMEYIMSLAIGVEFVKMLCTHKPGTIIEVLLFATARQMIVEHLNVYETLVGIGAIAALFAIRKFLFCSFDEADHMICRGSQTVARANFISGTNIPEEKTKLLRDVISEKLQEEDKNVAIGACVYYKDCALRVDSMKQGVVTRVEVIKNLMVERINGKTILTTPISAEDLKGIKIGDIVYLNGSMTTCRDVAHRRLVEEGRELPVDVRNNAIFHAGPIIRPLENDKFEMVSVGPTTSMRMEKFEYEFVKETGVRVIIGKGGMKENTERACKEFGAIHCVFPAGNAVVAATEVEEIVRAEWRDLGMPETLWNCRVKEFGPLIVSIDAEGNNWFEQQKVEFNKKKDAATEEICKQVGFIKMSNEKQVEQLTTYMANFIAHIAKKLPDDVIAKLTELRDKEDSPLSKTIYDTMFRNQELAVKLNRPSCQDTGVLQFWVKCGTKFPLIDELEGLLKEAVVKATFEAPLRHNSVETFDEYNTGKNVGKGTPTVFWDIVPNSDKCEIYTYMAGGGCTLPGKAMVLMPGEGYEGVTKFVMDVMTTYGLNACPPLLVGVGVATSVETAALLSKKALMRPIGSHNENERAAKMETLLEDGINAIGLGPQGMGGKYSVMGVNIENTARHPSTIGVAVNVGCWSHRRGHIVFDKDLNYTITTHSGVELMSPATITLLFLLFAVVMFVWEKIPLGVTSMIVCVGLVITGVLDWKTAFSGFIDSNVILFVAMFIVGGALFETGMANKIGGVVTHFAKTERQLIIAIMVIVGLMSGVLSNTGTAAVLIPVVIGIAAKSGYSRSRLLMPLVFAAAMGGNLSLIGAPGNLIAQSAMGEIGLSFGFFEYAKVGLPILIAGILYFAFIGYKFLPEKQGSTESSYDEQKDFSNVPKWKQMMSLIILILTLLGMIFEDKIGIKLCVIGCVGALALIITGVISEKNALKSIDLKTIFLFGGTLSLAAALQETGAGEEIATAVIGILGKNPSPYVLTFVVFMLCCVLTNFMSNTATTALLVPICVSIATEIGADPSAVLMACVIGGSCAYATPIGMPANTMVITAGGYTFKDYAKAGIPLIVVATIVSMVLLPIFYPFFPMIGLKPIKIPSAKERVASELRKAILSKQLKEGENLTLESVAQQLNVSITPVREAFQILAHDGLIKLRPNKGAIVLGITETYIREHYQLRGILESACAGFAASPDIDISKIEQSYLDAREMTASGDYSRYADLNREFHSEIWAASGNKKMENMIAELWNGLSMGSMVTEEEYAGISIKEHEAIYEAIKAHDVQLAQRRMYEHIMRSRDDMLTYYVMRNKRVCDYIAEAIQDEILSGRMSSGVPLRQEELADSLGYSRIPIREALQILESQGLAKRLATRHVVVADFSDEVITEIYELLSDVEIKLLKGMLQSGICLWDKAVSDNSEQPNCVHEPSAINEKLSAELQFHETIISNSHNEYFTHILENGLWCYIRFAVEETAAGRENARRLELLSKIAEAYSDKDINIVRELLGEYFGSLCEAVIAEREESSRMIVTMTCIHLLYMYLIGARKQDLVYAAVLDAILLLITVLVGFFRYSSKVKALSNALKRPVEEQAQLPEATDDVEMLYHRLLENQSIARSESESSAAIRQSQMRDYYSMWVHQIKTPISAMKLLLEAEREELGQLICDDEQSQCHIGDMTGGNIGAAGLNAALKQQAVLTELSDNMDSLEDELFRIEEYVSMALQYQRVSSTENDFVLEKVSVDGVIRDTIKKYAKIMIRRHIGINYSGTGQEVYTDGKWLAFMLEQILSNAIKYTPHGGVTIETAEEKDRFFITIKDTGIGIKAEDLPRVFEKGYTGYNGHADKKATGIGLYLCRQMADKLGHTIRMESEIGKGTKVWIGFDLDYADTRDMYRIFLVEDDETIAKLVRRHLEKWDYDVHVVQKFDAVMSEFASFDPHLVLMDIGLPFYNGYHWCTEIRRVSKVPVVFLSSAADNMNIVMAVSMGADDFIAKPFDLDVLTVKIQAIIRRCYDFGANNSVLEHNGAMLNISDATITYDDKRLELTKNELKILQTLFDNKERIVSRSLLMEKLWESDAYVDENTLSVNVNRLRKKLDSIGLESFIVTKKGLGYRLGMDIVLGNYKGLKANIPYIAYTEEDVNSQIATLLSGNPVREQKTGPLAMGDTAVIDYEGFKDGVAFEGGKAEKYPLGIGSGSFIPGFEEQLVGMEIGEDRDINLSFPEQYHAPELAGKAVVFKVKLHEIYNEKEAELNDEFAASLNFPEVQSVEDLKKYINEYLEYQVEARKADAAREKLYDQILESSSCLVSPQAVETAVNMQLQQMAASFAQQGVAMEQYLQMTGKTMDSLKDELKPVAQKQVKLEAVLDEIIRVENITVSDEEMDEQYELISQKYGQPVDVVKQVIPKAQLKPDLLRMKASQLIIDAAEIIMEESGKMNTKKYEELLVLLRSHKTDKEILEVLSDYHENDIADMFAGMNEKERKRLYRLLGTQRTAEIFAYLDEPQAYFDELSVEQAARVVSLMDSDDAVDLLENLEDEDKKEIVEHLDEEAEKDVRMLLSYDDDEIGSYMTTNYICIPGGLTVKQAMSQLVRQAGENDNIMTIYVVDSDECFAGAIDLKDLITAREGMNLESIIAHSYPYVLDHEKIDDCIDTIKDYAEDSIPVLSKDKHILGVITSDDIVEMVDNEMGEDYAKLAGLTAEEDLKETTLQSMKKRMPWLIILLFLGMIVSSVVGIFENVVAALPIVICFQSLVLDMAGNVGTQSLAVTIRVLMDENLSGKQKLLLVVKEVRIGLVNGGLLGIMALVFLGIYVHLFKGYTWLGAFAVSGCVGVSLLVAMAISSLVGTVIPMFFHKIKIDPAVASGPLITTVNDLVAVVTYYGLAFLFLIELMDSSDGLGRSKNNIGADIQVSIVLAGIVYSVRGRIHHRTVFRGTVMKKIFDVLNVIKQKLFVKKDKIHSEKYYRRIDFLNKYSLLFHAIIAMAIVFIVEIISRRSFISACKFVDAHTLAFMYNSFLVFVSFSLVYLFRRRAFARVIITGFWTILGIINGCVLSNRVTPFGYTDLKCIPELLAMNNTSYFTAQQATIVVVGLGAFALFLVALFIKGPKYTGKIRYAGVSVAFLALLFVAIPVTTNVAQNTNVVASYYSNIAQGYDDYGFVYSFSSTVVDRGMKKPEDYNKQNVEDVEQKVNSQKQTTTVDGKTGPNIICVLLESFCDPDEINFLQVNEDPIPTFHELEKNYSSGYLNVPVVGAGTANTEFEMLTGLSMQYFGTGEYPYKTILKQTDCESIASDLSKIGYATHVVHNNGGNFYSRTNAFSKMGFDTFTSKELMNITEYTPNGSWPTDDILVSETMKTFDATPDQSDFTYIITVGTHGDYPKEPVIENPTYTVSGVEDEGMKNAWTYYVNQLNEADRFIKELTDELSKRDEDTIVVMFGDHLPTMGLQNSDMKSGDIYKTKYITWNNMGLPKEDADLYAYQLLAKTTDTVGIHEGTIMNYHQTQMNSTDEASYQDGLDLLQYDILYGKRYCYNGTDLYPASDLVMGIDKVDITNVSDSSTGDTVYIYGHNFTNWSKVYINDSKVASTYLSAGVLAIKKEDISDGDEITVCQVGSSDTIFRKSENAYTYVDPAVEHDSESETDEPTDNQMPENSSCSSAGSCTKSSCEGCPSHNGGPQSFLVEQNKFSNIKHVIGVVSGKGGVGKSFVTSSLAVNMAKKGYKVGILDADITGPSIPKMFGAHDQILGDENGLMHPYETKEGIKLISVNLLMDNEEDPVIWRGPVIAGVVKQFWNETAWGDIDYLFVDMPPGTGDVPLTVFQSLPVDGIVIVTSPQELVNMIVKKAYNMAEAMHITVLGVVENFSYLKCPDCGKEIKLFGESHIDEIAKELSVPVLGKLPLDTSYAAIADKGDFYSIENDHLAKATEVLEHIMKMPDRNMIFHPAFIMHQLILPLMFDIGFLSSFVVCLIWLVNQCVMMKIAKKMSRKHINVKKQNPIALLPIAVFLVLYLGLGILFEYVMKIPMGFYNVPIIIAFLVAILVACLQNRSVKFDQKLEIMAQGLADKNIITMLLIFLTAGAFVGVVGRSSAESVAYFMLSLIPARFAVMVLFVVACFVSIAMGTSVGTITLIVPIAAAVSDASGFGLPLCIGSVMGGAMFGDNLSFISDTTIAACNGQGCQMKDKFRENFFIALPAAVMTLVVIAILSFRTDIAGAVSQEYHLLQIVPYILVLIGGIAGINVFVVLIIGIISGTVIMLATGNTAPYDLLANMGSGASGMFETCMVAVLVAAMCALIREYGGFDALLSGIYRTFRGKRGGLLGMGLLVGLIDIATANNTVAIVMANPIAKEMAQKYDITPRKTASILDTFSCIFQGMIPYGAQMLVAISAVHELGHDVSAFNILPYLFYPMFLLVSSLVAVLVVENGSKFNMKKKIIILLSVVIILLMGIVVWFNIPLDLMDLDPNEVMEIVVFNGNSGNATHITDKEQIQHIVENLNGVEVKRSKLSLGYMGYSFKVTIYLSDGNEAGDWNNFIINSDDTIRKDPFFYSVTKGNIDYSYIEGIVEMKLVSPKTLLASLLGCTFVVMKVMTFDGLVDMFWIILIGYLTVKAIVTAFSQEAYDEDIRQAQQGKVLYRDLFGKFAYIAADVPILLILLAGLLASVCSVTTLLRATLMGLLLIAVGYAIWFSWYVSKHKRLRMKNGEWGTGILSAEDEKAWKRSNLWHGIILGIAGVLFALYLIFGDPRIYFNNAKLEKTLTALECDSITLEEIVPFEWTTVYTFDPYTSKERIERVVGSKSPALKESVSEGMNHVVFINRGRVVASVCTHPASTGYYLSFTGGENTYYSYSDGGYSHIEYGDEIVFEVMQDDGFVRLYARVEKMKEYQHLIGKIIIATAIIVAAIIIAGAIDRAGANIQRGLGYLGDALLRMEENAISGDDNTHWFHSNGIITSIDNSQKKICVDISQKNNFFDGTNITLNCNKSSLDITYLEAGQEITFYFFENNVLDTEVAIEKLNIVTPMIENDILRDVLLEDERVPSTNELAKLYAINPSTAAKGINILVDAGILYKKRGIGMFVSDGAKEVIRTKRKARFCMKKKFVAIMMVAAMAASMAACGSDGGSSDTQKGGSSTTTSDVANKDKPLVWFNRQPSNSSTGELDTTALNYNKDTYYVGFDANQGAELQGEMVKEYIEKNIDTIDRNGDGVIGYVLAIGDIGHNDSIARTRGVRKALGTGVDKSGEIDSAPAGTNSDGKAAEVQDGKITVNGKDYVVRELASQEMKNSAGATWDAATAGNAIGTWSSSFGESIDVVVSNNDGMGMSMFNAWSKDNKVPTFGYDANSDAVAAIAEGYGGTISQHADVQAYLTLRVLRNALDGVDIDTGIGTEDDAGNVLSDDVYVYKDDERSYYALNVAVTADNYKDFTDSTVVWAPVSKQLDSGKHPTKKVWLNIYNASDNFLSSTYQPLLQKYDDLLNLDVEYIGGDGQTESNITNRLGNPSQYDAFAINMVKTDNAASYTALLNQMGDKNNENILSIRGMSKSFGRNRVLDHINLDVKKGTVMGLMGENGAGKSTMMKCLFGTYQKDEGTIYLDGKEVSFSGPKDALENGIAMVHQELNQCLERNVVDNLFLGRYPVNSFGMIDEGRMKKEASELFRKLGMTVNLEQPMKNMSVSQRQMCEIAKAISYNSKVIVLDEPTSSLTVQEVEKLFQMMRMLRDQGISLIYISHKMDEIFEICDEISVLRDGNLVMTKSTKETNMNELIAAMVGRVLENRFPPVDNKPKDVILSIQHLSTKYEPHLQDITFDVHEGEIFGLYGLVGAGRTELLETIFGIRTRAAGRVYFKNQLMNFTCAKEAMDYGFALITEERKANGLFLKGNLTFNTTIANLGSYKNGPALSDSKMTKATSDEIKIMHTKCMGPEDMISALSGGNQQKVIFGKWLERGPQIFMMDEPTRGIDVGAKYEIYELIINMAKQGKTVIVVSSEMPEILGITNRIGVMSNGRLSGIVNTKETNQEELLRLSAKYLMANSKILTAEQERALRQPIDEYVGGIQKEIDALRKDGTTRVVECQSAIAGIKRDKTLSKGEKESEIAACEKELAKAKAVEAKNRDEISKLIAKAESYLKENFDSKYYNAVKASCEAEKAEALAAHNERMAELDKKHKAALAKTSDSTEIKEENYVHKNRISNEKLELEKEYQTIKDKKHEAYSYKYHLIDMLRLSKFTFMEKRAQKWENYKYTFNRRNFLLQNGLYIAIILIFIALCVITPIKKGTPLLTYNNILNILQQASPRMFLALGVAGLILLTGTDLSVGRMVGMGMTTATIIMHQGINTGSVFGHIFDFTGVPTGARVVIALLACIVLCTFFTSIAGFFTAKFKMHPFISTMANMLVIFGIVTYATKGVSFGAIEPVIPNMIIPKVNGFPTIIIWAVAAIAIVWFIWNKTTFGKNLYAVGGNPEAAAVSGISVFAVTLGAFVMAGILYGFGSWLECARMVGSGSAAYGQGWDMDAIAACVVGGVSFTGGIGKISGVVTGVCIFTALTYSLTILGIDTNLQFVFSGIIILVAVTLDCLKYVQKKMYTLLLVDDEEDVIEVIERKVSWEQIGFHVVGHAGNGFKALEMMEDMQPDVVMTDIRMPYMDGLELCSNIRQRFPATKLLLFTGFDDFEYAKEAVHLEIEEYILKPLNMAEITEVFKKLKTKLDDELNEKKNTDILKQYYAASLPVLQSNFYTTLIEGRIPENELGRYMSDYKISLEEPYYCCIIIHTSASQMPQGMDIRLLTVSVERQAQADLKERWNGRIFNYLGDTVMIAQLVQQEDISELTDECDRFCKYVNHVMGAKVTVGIGQVCECIQELVSSYQSAREAVSYRVLYGSNRAINMTEVEPQRRISKDGDEGNELSYLFKMICIGKIEDVGQAVEAYMQHNFMSQQSLENYHVAVMELISELYHFMSNNELNAQEISGSVGRLYNELSNFEPVVLKQWLLDFSSRLHDDMADARYNSKKSLIDSAKDYVHRNYRSMDLGLDDTCKELGVSNSYFSSLFKKETGSSFVEYLTDYRMDKAARMLVETDDKSYVIAQNVGYADPNYFSYVFKRKYGVSPSRYRTEYEKNKVMLSFSLLSLAIMLVTVVVMYIKFADASQDSIIESNHKVMDQTIDSVESYLVNMRQVSDAAYYYVIKENDILTQSDTIHDGMSLLYESNKEYLRSIAMYNQYGSLIAAEPVVSQKEDPDVTKQDWFIEAMERMENIHFSTPHVQNLFDDGSMRYHLVISSSRAVELTYGSESQMGVLLVDMDYSSVSRMLERINTSGKGQYYYLCDAKGNIIYHPHQIQFDGDVPENSEVAAKSQNSIYDDYLNGVHRKIMVDTISYTGWKLVCVMPYSIFTNKMADVKQFVFVIMIIMAMMFVWINRVISIHISKPIMKLDDSVKRYENGNEADIYVGGSSEIRHLGYSIRNSYKQNNELMKKVVWEQNERRKSELDVLQSQINPHFLYNTLDSITWMIEGGKNEEASFMITQLAKLFRISLSKGHTIITVRDELLHAKSYMNIQKVRYKNKFEVSFEVDEEIMDYCAVKLVLQPILENALNYGIRELDDFGEIVVGGQKVGEDIIITVSDNGMGIPENEIPLLLTNTDRVHKKGSGVGLVNVNNRIKILFGERYGLHIESELDEGTVVTIKIPAIVYSEENRLQFEEHHIVMTVKNKWTNMSKNKRNFIITELLLGVLLVIGIGFIAYNKLNEKPERIAVVMADVDESHSAAFKYGMKMAASEYGVDVVMISKENLNNMSDEIDVIKQEINKKADAVVFKPTAEKMTEEKSLNTLIRINKKTPIMVVGDQAGSESFKSLNTVEFDQYSMGAELAQKLLADNNGTLSGKKIGIYCENTESDACKKRIDGIKDTLAESGCVVMWIVSGVSDTGEKINLQSQRKVDIVLAIDDASVVEAAKEASDNNLQGALVYGIGNSTEAIYYLDSGWTEALITPDEFAAGYKSVVGLVDMLRGSRKYSVEEKPVSYQLLTRKNLFDEENKKLLYAISQMRSRIRNTMMILCFALILSFVSCSNTRVDEKKHIYIGVTCYDQKDTFIGELIETFKKECASLDTDKYDISMTIMDAAGSQRAQDDQVQEMIEDGCNVLCINLADRTDLSHIINAAMEKDIPIIFFNREPVDEDLNRWDKLYYVGAKAKQSGQMQGELIADYIKNNPGVDKNGDGRIQYVILEGEMGHQDAIVRTESVTESMKNNGLQIEKLSCQIANWNRAQAQNRMTQLIGQYKNSIELVIANNDAMALGAIDAYEKLGVTESNVPAFFGVDGTDDGLEAVQQSKLAATVYNDKEGQARAMAQLAYLAATGGSMKNIKFEDKKYVYLPYEKVTPDNVNEFVKDEQMDKLSFNIFPNVNFIDLCMYQFGHEQCEPGHSFGPATRNHYLFHYVLSGTGTLMADNAKGITQTYNIKSGQGFLIFPGQINTYIADDKLPWEYIWIEFDGLRVKEALTTTELTKNNPVYHTHSKDIREKLVEEMLYITRHPSESPYHLIGHMYLFLDYLMQSAKSSKLVPGGKMSDFYIKEAMNYIEQNFQNDISIEDIAGVCGINRSYLGKIFKNSVGHSPQEFLMNYRMIKATELLKLTSLSIADVGSAVGYENQLHFSRAFKNIYGVAPREWRNEHKMAKRKICQAMAVVLALGMCTTGLTGCGNEKRADGKTEIEVVSYKPEAVKAFEKIEKQFNETHDDIHLTISSPNEAMTILKTRFIREDYPDIIAIGGDINYSNFLDADLFEDISDLDVVDTVKEAYLDMDKELEFIPKDGTYALPYAANAAGVLYNKDMFAENGWKVPTTWSEFTALCDEIKESGTLPLYLGFKDTWTCLAPWNALAVGLCDSDTCNQVNMGNTTFEEAYSPVADKIRTLLDYAEDNPYAYSYNDACTAFARGESAMYTIGSYAIPQIKSVNPDMNIGSFTFPANDNEADNVLNSGIDLQLSVMKACKNKEAAYEVLEYLYSDETIQTYLDDQGGIACKEGDFAIPDTLEDMQEYIKDNRMSDYQDHHYPSEMSVDAMIQTYLLDTGDNAKEKFLKKFDSDWKRYNRDLIREVQDYQKEQEDAKMKKKMSNRDKTFWAVVIPVVVLFFAFNTLPMIKGVIYSFTNYKGYGSYDYVGLRNYTDLFTDARVGKSYLFTFKYAIAGTVLVNVLSLVMAVALNSNIRGKSALRGVYFVPNILGGLVIGYIFSFIFTYILPVVGNTFNIGFLQNSILASEKYAWIGVLIVGVWQAVAMNTIIYISGLQTVPEDVYEASMLDGAGKWKQFWKVTFPLVMPFVTINLVLSTKNFLMVFDQIMSLTKGGPAQSTESISYLIYRNGMDGGQFGFQSANAVIFFVVIVAISLFQMGIMNKKEEQLMKKQKTNWVLTIVLILGTLTVFFPLYMAVIIAFKKPSEMTNDVAGALSFPSKWSFSNFTEAMKVTDFWHSLGNSLLITIVTIVLAILIHSIAGYVIGRGMARKKSFRFIYLYIVSGMFVPFSILMMPLVKQTAQMGLGNRAGVIILYLVFYMPMNVLLYSGYLKNIPMALEEAADIDGASTWTTYWRVVFPMMKPMHATVAILTALGTWNDVMTPLVIMSGTGQNTLPLAQLNFQTQFGTNYNLAFASYILALIPILIFYIICQKQILNGVANGAIKGMAIIFNPNKKIFTLQTAHTTYQMQVDRLGYLLHLYYGAKSTCDMDYVLTYADRGFSGNPYAAGMNRTYSLDTLPQEYPTLGTGDFRNIALDIKNEQGTESVELLYKSHEIRDGKYALKGLPAVWASDDEAQTLEIVLGDDIAGVEVHLLYGVLEACDVITRSVLIKNTGSRNITIEKAHAACLDMVYGDYDVIRFYGKHAMERNLERTHLGHGTLSFGSRRGTSSHQYNPAVILAQRDTTENAGDCYGMLFVYSGNFSCEAEKDQINQTRLLMGLSDELFSYPLAAGETFTVPEVIMSYSADGFSQLSHQYHTCISEHVCRSRFAHEVRPVLINSWEAAYFDFTGDTIVDLAKEAASLGIDMVVMDDGWFGKRDDDNSSLGDWFVNEKKLGGTLSELIDRVHAQGVKFGIWIEPEMVNEDSNLYREHPDWAIRIPGKLPVRSRNQLILDFSRKEVRDNIFDQICAVFDQGKIDYVKWDMNRSMADVYAGNLAYDYVLGVYDFMERLVTRYPDILLEGCSGGGGRFDAGMLYYSPQIWCSDNTDAINRTRIQYGTSFFYPVSSMGAHVSAVPNHQTGRVTSLKTRGITAMAGTFGYELNPALLSDEEKEEIREQIKTFKKYEMLINEGTYWRLTSPFEDEVAAWMSVSRAKDRALVSVVRLYAEANAATYYVKLKGLESDAVYIEENTGRQYTGAALMNAGIPLPFATKEYEAYQFSFIRLDEAKKLYDEIKKVCGNLKLSEADTADSSSDKRIVISIYGGSGSGKTTIAAALQQYFLNDNTACYVLTGDNYPHRIPMRNDEERLNVYNESGEDGLRGYLGTPEEIDFDRINKELSEFKAGKDIIEIKHMGREDGDISYDETDFTGIKVLILEWTHGGSEYLKGVDIPVFLESSPEETKARRIKRGRDENAASPFICRVVELEQEKLDLQGKNARIVVGKDGKVYEQMNNKPMLNAYPDSLGGKLSDIAALLKKKEMQDTFSSFYILPSLYHSDLDRGFSVVDYNLNEELATIEDLSQLKELGIDLKLDFILNHASAQSPQFKDLVEKGDESEYRDFFIDWNKFWEGHGVMTDEGYIQPDESCLKQMFFRKPGLPILMVEFPDGRRVPYWNTFYQEVHGREYLGQMDLNIKSEKVWDFYRETLEKITSYGAAIVRLDAFAYAPKAPGKKNFLNDPETWEFLQQIHELAAPLGLTLLPEIHAAYEEKIYKTLADKGYATYDFFLPGLIIDAIENRRADYLAKWAREIVEDKISTVNMLGCHDGIPLLDLKGLLPEDDIRSLIDLIVSRGGMVKNLHGQKNIYYQVNATYYSALGESDSKMLLARAIQMFMPGKPQVWYLDLFAGKNDHEAVRRAGESGHKEINRTNLSVSDIGEALKKDVVAKQLELLRMRNTHKAFEKGAVITVAGEGPKLSIRYDNGEAYALLTVDFEAGAYEIELSMGTYLNSITPYTLYKSESLSPYFVDKTLMLRELFPYVSAGNRHICITRPRRFGKTIMANMISSFFQKASDSSDVFDSLTISQVDDYRRYKNQYNVIRIDFSKLPRNCDSYTQYIERIEALLIEDVKEAYPQVKINEADAIGDILESVFVQCGEKFIFVLDEWDFIFHRDFINEIDKEKYVAFLSNLLKDRPYVVLSYMTGILPIAKYSSGSELNMFAEFTMVNSPMFGEYFGFTDDEVDDLYRRYIVECDRQHKEKSVTRKGLRDWYNGYYTKSGERVYNPRSVVFALQFNNLANYWTSSGPYDEIYYYIRNNISDVRDDLALMISGESVTAKIQEYAATSMNLSTRDEIYSAMVVYGFLSYLNGKVCIPNRELMEKFDELLVKNESLGYVYRLAKESEKMLKATLAGDTLTMERILEFAHNTEVPLLSYNHETELSAIVNLVYLAARDSYRVEREDKAGTGYVDFIFYPYDTTADCIILELKVDHTPDEAIAQIIDKKYALKFMPKLAGQKIYTGRILAVGIGYWKESKKHSCKVEEILKMEYEHITHSFKPVYDENSRILILGTLPSVKSRENNFYYGHKQNRFWKLLAYLLDESVPETIDEKKYMLFKNHIAIWDVIQSCDIRGSSDSSIKNVTPTDIRKILETSDIKQIYANGNKAGALYKKYQLPLTGMEAVTLPSTSPANAAWSFERLCEAWSRILVNLMKTIEFDTHFYKKLWTLMVPIMVQNLMLALVAVADAFMLGGLDQNYMSAVSLATQIQFIQNMFLSAATAGLAILGAQYWGKQDIKALDDIFALAIRICGIVSVLFFVACAIFPRYLMLIFTNEPVLIDYGVSYLKIASFSYLLTGFSQCYIVMMKISEHAGTAAAVSSITVLINIMLNAIFIYGAFGIESMNVRGAALATLISRVVELMLSITFSYRPGYIRLKIRGLFARNKELSADFMKCSGPILGASLVWGIGFTSYSTFMGHMGTDAAAANSVAAVVRDIICCLSAGISSAAGIMIGNELGAGNLKRGKAYGIRMAKLSFLCGAVMTVLMAVSAPVILHFVKLTPQAAEYLKQLFGVLAFYMIGRSVNEIIINGVFGSGGDTMFDMYSLAVTMWGIAIPLAVAGTYFLNWPVVVVYACTCVDEVGKIPWTLIHFKKYKWVKDLTRMQEIYRVKTSPVALSDNMIIGEKYRITLLTEALVRLEYSEDGVFEDRATQTVLFRDFPKTGYHVVRNADGIEVHTSMLHLIYNEKEFSSHGLSIQIKGNLSAYHSIWHYGEKVHDLQGTARTLDDVNGEVELGHGVVSRFGYSILDDSKSQILLDDGWIEPRKKGVSDLYFFGYGHDYKQALNDFYRLCGKTPMLPRYALGNWWSRYYKYSEESYMELMDKFDEKNIPFTVAVIDMDWHQVDVDPKYGSGWTGYTWNKKLFPDPKRFLGKLHDRGMHTTLNVHPADGVQGCEEMYVDMAKEMGVDYENEDPVVCDPASPKFMDAYFKYLHHPREAEGVDFWWIDWQQGSNCKVEGLDPLWIFNHFHYLDNKRDGKRPMTFSRYAGPGSHRYPIGFSGDTHITWESLDFQPYFTTTATNIGYGWWSHDIGGHMLGYKDDELTARWTQYGIFSPIMRLHSSCSEFNGKEPWRFKKETEEAMEAALRQRHCMIPYLYTMNYRSYAENMPLIEPMYYEYPENAEAYEVKNQYFFGSQLMAAPVTTPRIKGLNVAKTKVWFPEGIWYDIYTGMRYDGGRMLEVYRDLSSIPVFAKAGGILVCADADELDARSVIKNPDVLCVRVFPEADGEFELYEDDNESCGYVDGRCVTTAMKYSADKDMFVISPADGDTSLIPDSRTYKLVFERRTEAAADKVKVSVDGKEVLAKSKYDKENRKLIVTVNASTASKISVAISKDTVALDNQIEKRCFDFLNQAEIGFVLKDEIYGLITSGKKTTVILSELKAKELDTELYGVLTEILTAMRNSYKNCKIQDNTAELIYENGSLFVTIFENNIVHVAQKPGIESVAIEEGFIPKAATPDVTCKDTSDAKGNAAEAGVSDAAVKAVIRARDITVNVKDNEKLDIYYKGKLVLSDYEKARKKSEKNPYEDLAIAELEGHTVGKDEEKTDSVTIIKKLGKDDAIYGLGDKPGCLNKRGYSYVNWNTDDPAPHVDSFKSLYKSIPFFIVLGDEYCYGIFADNTYKTTFDFGYENTDYYFVEHEKGELDYYFMPGNDMAEVVGLYTSLTGTTPLYQRWIYGSHQSRWGYYTQDEVLDIADKFRELDIPCDVIHMDIDYMNGYRVFTFDDKKFPDVKGLSEKLADRGVKLISIIDPGVKKDEDYFMYKEGMEMDAFAHDTDGSVYENAVWPGTSVFPDFTKQSVRIWWGDKTKILLEHGISGIWNDMNEPASFNGPLPDDVQFEYGAHEKVHNIYGHFMAKATYEGLAKNDGGKRPFVLTRAAYAGSQKYCGGWTGDNHSIWAHIALSLEQVCNLSVSGLAMCGSDIGGFGSDTTPELLVRFYEAAVFVPFFRNHSAMGTRRQEPWQFDETTIDAVRKTVKLRYRFIPYIYDLAHECEKTGAPIVRPLVYEYPADKHVRNISDEYMLGSFVLVAPVIAPGKEAREVYLPDGDWYDYYTGEKYSGGRYILADAPLDKVPVFIKAGAIIPVADGEIRSTEDITEDKISILTYPGKGSFVHYQDDNETFAYRNGAYNAVEYTLDGETLEKRVLHKGLMKFISWNVNGLRACVQKGFLDFFNSIDADFFCIQESKLQAGQIDLDLPGYHQYWNYAEKKGYSGTAIFAKNKALSVSYGIGIEEHDREGRVITLEYDNFYLVTCYTPNSQNELKRLPYRMQWEDDFREYLKALDAQKPVVLCGDLNVAHNEIDLKNPKTNRKNAGFSDEERAKMTELLGSGFTDTFRYFYPDVEGIYSWWSYRFKAREKNAGWRIDYFITSKRINDKLQKAAIHTDVLGSDHCPVEVDIEFMSQETNSAPVTENKMGTMPIGRLVFNMSLPMMISMLVQALYNIVDSIFVAKLSENALTAVSLAFPLQTLIIAVATGTGVGVNALLSKSLGAHKYDEANKIGINGAVLYAFSYVIFLILGLTIVKPFYMSQIGNADVEIMDMGVSYLSTVMIFSFGIFAEIFFERVLTSTGRTIFSMTSQLCGAITNIILDPIMIFGLLGFPKLGATGAAVATVVGQCVAAVVAFACNHKFNHDIKLSFKGYSPDFKIMGTIYAIGIPSIIMQSIGSIMTYAMNRILIGFSSTAAAVFGVYFKLQSFFFMPVFGLNNGITPIIAFNYGAQNRKRMVKTIKVSLITAFCLLFVGFACFEFIPKVLLGMFSASDDMLKIGVPALRIIGVHFLIAWFCIIVGTVFQALGKAVFSMIVSIMRQLVVLIPAAYILSKLGGLHAVWWAFPIAEVISFTVSTLFLIRINRTIISKIPDGSDVLMKFNFEFAEKISRTYSDECRPLCHELKLPQTAFDILMFLANNPEYKTARDIVEIRKIKANLVSVNVDKLVNEGYLERKPVENDRRKTELVCTKKAGTVIERGRRIQQQFTADLFAGIDEEQKRQLTIVMEQLENNMDEIIRRKSHKMSTLITIIVTFFAGMGAGLGTGFAGLSAAAVISPMLITFLGMDPYMAVGIALSSDVLASAVSAYTYGKNKNLDVKNGLIMMVMVLCFTVVGSYVSSLVPSATMGSFSVFMTFLLGIKFIVRPVMTTKEAMQGVSAKKRAIQSIICGVLIGFICGFIGAGGGMMMLLILTSVLGYELKTAVGTSVFIMAFTAFTGAASHFAIGGKPDGFVLILCIVFTLLWARIAAVFANKASAKTLNRATGIVLVILGIVVFAFSLLSMKNSVFFIYLLILAGSTYLIRVIPFIAIKEKINNSFVRSFLYYIPYAVLTAMTIPAVFYATNWWVGAAAGLIAAVIFALKGKGLTTVAVASCVAVFIVELFHMKNYKRGLTAGIPIALGYLSVSFTFGIMAVSYGLSWWQAVLISMTTVTSAGQFAGIGIMMHPGQYFQMLISQITINIRYSFMSISVGQKADSRFSGISRWILGFMMTDEIFAVASQEDSVSRSFFAGLSTLPYIGWAVGTLIGAILGSILPDRLMSALSLAIYGMFVAIVVPEMKKSRAVVFVVLLALVLSCMFYYVPFLSRISSGITITVVAIVAAVIGSLLFPVADDTDKEMKVVVAIDSFKGSMTSMQAGMACKEGILAAIPKADVVVRPLADGGEGTVTALVEGMNGTYEHVDVTGPMGQKVHATYGVLEDDTAVMEMAEASGITLVEGKPDPWKATSLGVGEMILDAVHKGCRNFIIGIGGSATTEGGIGMLSALGYEFYDEDDNILPPVFGSLARVKKIKADKVPSELKQCHFKIACDVTNPLCTEQGCVYIFGKQKGVQEHEKARMDKMMRQYADCVEEYAGKSFSETPGAGAAGGLGFAFLFGLENVELKSGIDIVLNAIQLDKELKNADIVVTGEGRLDGQSAMGKVPVGVAKAGRKNGCKVIALAGSVTDDAVACNKEGIDAFFPIIRGATTLNEAMDIKNAQKNMKNTAEQVFRLIDISSLMEMAKEKKLVEAITSMEEDFTQWYTDVVKKAELMDYSSVKGCMIFKPNGYAIWENIQKNLDAMFKETGVENVYMPMFIPESLLQKEKDHVEGFAPEVAWVTQGGLETLQERLAVRPTSETLFCELFSKTVQSHRDLPKVYNQWCSVVRWEKTTRPFLRSSEFLWQEGHTVHATAEEAEARTVQMLNIYADFCEKYLAIPMVKGRKTDKEKFAGAEATYTIEALMHDGKALQSGTSHNFGDGFPKAFGIQYTDKDNKLQYCHETSWGVSTRLIGAIIMVHGDDSGLVLPPKIAPTQVMVIPIQQQKDGVLDKAYDLKDKLSKDFRVKIDATDKTPGWKFAAQEVQGISTRIEIGPKDIEKNQCVIVRRDTREKIVVSLDEVNEKLAEVLETMQNDMLEKAKAFLASHINDAHDYNEFKAIAETKPGFIRAMWCGDEACENKIKEDTTVTSRCMPFGDQEQISDVCVCCGKPAHKLVYWGKAYMRIDLPQNVNFIIDTLYEHGFEAYAVGGCVRDSLLGRTPQDWDITTSAKPAQVKAIFDHTIDTGIQHGTVTVMLEHVGYEVTTYRIDGEYEDARHPKEVTFTSNLKLDLERRDFTINAMAYNHRMGIVDEFDGIGDLKAHVIRCVGCAHDRFSEDALRMFRAVRFAAQLGFDIETQTKAAIKELAPALSKVSAERIQVELVKLLTSDNPQMMRDLYELGLTAVFMPEFDVMMQTPQHNKHHMYSVGEHTLHTLEHVRADKILRLTMLLHDVAKPVCITTDEEGQNHFKKHPVVGADMTRKILRRLKFDNRTTDCCFKLVKEHDDRPAITERNVRRAMSRIGTELFPLLFEVKRADTLGQSMYRRAEKLEYIAEYERVYRKILADHQCVSKKEMKINGSDLIKMGVEPGPKLGDILDRLYELVLDDPSINEAQKLKELANKIITSLIMYNQPEVALEKYELTVSRIIKGRGAYICDTGIGQKLLVPYRGHEQRACALRDTLAFIQRNGMDVEQISQTKEQCIISLDNCEDAYILKDYRAGRECSTDSIDDMRGGSRALAQLHNILEKYPLPSDIEVESLHEKAQRKCAQIVKLKNYILRRSKTNAFEHLFYECYERFLEQGKKSAEILCELENSKTLVPTYCHGAFNQHNVVYTQYGRWLPVNFETMHPGYPETDLAEYMRKMLEKNHWDTAVADAILDSYCSVRSLDDTSMRLLQALLLFPEKFCKLCNHYSNSRKSWVCDRDVDKLAQLIQLSGEREEYLHAIVMTIRYIIIVESLLRKVQTYITENDSKSSDSSGYSLINKDISDYLSTLTSLLSSKMNKADLVAAMAEKAGVSKKDAEASLKAFTDVVAEELKKGEKIQLVGFGTFEVSERAARTGRNPQTGAEMTIAASKAPKFKAGKALKDSLNMRLDKFLKVSRLIKRRTVANEACDAGRVTVNGRPAKASVNVKVGDIIEIAFGQKTVKVKVLNLLDTTKKEEAKDLFEYIMEEISGTKSHKLILNNRRTGSFTGILDVLSFDVGEILLETELGMLDLKGKDLHVNRLNLEKGEADIEGEIDMITYSKVPEVTGKKDKMFGRIFRMSKRRAKRRGGTLSVSIIVIAFLVVMVVQVVQLKQKESTYAAQKAELEKQYTKESERADEIESMQQYMQSDQYIEDIAKSKLGLAYDNEIIFKEKDKMRSANLKKAVWGLMAFASTLVCVMDCYPLIPAVYGVYCLSSGHTIIFYIGLIIGMGYFISIPSICKYLFIIAVIYFGERLFVRKSSKNGCLTTAVVAACATAVMNLSVTFLGRPDTDEIVLSVAESLVVFSMAFVLCRACEYLRALEHNENPVIAGLLPDREEAFATAVSGLSGIISTANVMAVKCTADKIPDESEKIQLEVTGRLCACCEGCSVCWTSGASISDSIKMLADAVRKRMKTEEIVQNRYVDGCPHYTRMVEAATEAFARIELNEAWYRRLTENRRVIAAQLDAMAELMESWCRAEKCIDKKRRLRLSRVYVYTKEAGIQVENAHIYENARQQVCIKADVCTKIEGGIEISKYVQAVSRAMGVKLRQAHGTVSIISDERTSIVLYEENQLYALSGVATKKKTGSQANGDSCSMFQLDDGMYHVCVSDGMGSGKQAQAESTLVVDLLEKLLEAGFSRESALKLMNSAMVISAGEESYSTVDFATIDMYTGELELTKTGAAPSFIKSGKQVSVIENESLPAGVDVWQESKQSKNILQSGDFLVMVTDGVLEYLHVKDRQGKLMDIIAGVKSDNAGVMAQEILDRVLLDTGGYAMDDMTVVAIGIWEKMIRRTKDYILENKMINNHSTVLVALSGGADSVCLLLLLNEIKRQCADELDFALEAVHVEHGIRGAESREDARFASDLCERLNIPCHVHFVDVPQYAKSHGLGLEEAARILRYEAFEEEAGRYPCEPANASDPNQDNRRQVVVAVAHHMEDNAETVLFQMLRGSGAKGLSGMHPVSVKNGVTYIRPLLSATRAQIEEYLKENGQAFVTDATNTDTAYSRNKLRHDVFPLLLQINDRAIEHINESAGQLAVMNDFYEQQLKEACDSMISKKEGRVILEISRFESLHPALKSGVARECIHLASGRLKDITSTHIGALVKLAGQQSGRKINLPYGIIAEKSFGEVILCAGRCDDEKAEIHITQKELEALSATGEQKNIKLSADGSYVTLCIQDFNGKMDEIPKKPYTKWFDYDKMKKGFEIRTRKAGDYIIVDDEGHHKKLKQVFTGDKIPAQQRAGLWLIAHESLVHAIIGYRSGCGALVTPQTGKVLKITFYGGKQNGFFKKIMDFSKKYDISVYLTEEQLNKRIAEIGAQITEKYRGQSVYLICILKGSIFFTTELAKRIDLPMTMDFMSVSSYGSGTESSGDVKIKKDLEHSIEGENVIIIEDIIDSGNTLSRLSKLLAKRNPKSLTICTLLDKPERRVVDDVNVDYVGFVIPDKFVVGYGLDYDQRFRNLPYIGFVEGEIKMNKQKSGMRGIGVYIIIVFAVICIWYWLSAGATSNSYTQSQFEKDLDKNQVKSVKVVQNREIPTGSLEVKFKDGTSKVLYVSDVNNIEKTMTKAGYTDYTVADVPAESWIMTLLPYVLVFGAMFIFFAVMNNNAAAQGGGGKMMNFGKNRAKLTTQEENHIKFSDVAGLKEEKEEIAEIVDFLRDPGKYTRLGARIPKGVLLVGPPGTGKTLLAKAVAGEAGVPFFTISGSDFVEMFVGVGASRVRDLFEDAKKNAPCIVFIDEIDAVARRRGTGMGGGHDEREQTLNQMLVEMDGFGVNEGIIVMAATNRVDILDPAIMRPGRFDRKVVVGRPDVGGREEILGVHAKKKPLAEDVDLKQIAQTTAGFTGADLENLMNEAAIRAAGENREYITQDDIRKSFVKVGIGAEKKSRIISDKEKRITAYHEAGHAILFHLLPDVGPVYTVSIIPTGAGAAGYTMPLPEKDEMFNTKGRMLQEIVVDLGGRVAEELVFDDITTGASQDIKQATKLAREMVTKYGMSDNIGLICYADDEEEVFIGRDLAHAKNYSEGIASAIDVEVKRIIDESYDKAKSMIAEYRDVLDRCAALLLEKEKITRDEFEALFDEDSKTAVGHNIMFKRKHVTTLITYSLVFFSAISMTACSFSDVSYLFKSPAQKQAILHKSPAFWEDTTSVKGSSNLSILHNVAFEGRPYNDTRQFGDNILMVGQGSYNNSILETDDQSVQYSFDVYNPWSNEITASLTHDKTNCDDYMIKGDRLWLINSDAGRATIYDKDLKEIKTCKYNPEDYDGNCDTSDSDDGDVPNPGNYYDVSQIATSADGKYALVSGVTPDTYKYAVSDIRIDDNTVLSTYEGQSFSMSCVDSKGFVIEADTANNIWNYHSSDGENSFFSLPDVVDVTLAEDGDILIRCQDLSSDNIISYYKYSPATGVSSSFSYNLATRSTGKMSDSPSDSAAADTKTYCSANSVYLPDANCVMMLLYTAQCNPEILIWSLDKGKNDSKAEITSYNDCDALLQALRDDGSYVSPYSVIDPSDSTDENQEAMEEAGKDSDYNTYGDEVTLIPDTASYDWGDLSDINARITALEQKYGFSIYFGPEVPKRIDYYDIHQFKNKDKLSVALDALEEILGCFPDDFFTQLCYGDIRGMRIYLCGDISSGHSDMINEPSGFVNIINNHNVMVLNCNYSWDFSYTVGHEISHLIDQRLTFIHTYDGKSEFSEEKWNSFNPDSFSYDDSYANYNPDDPSSHISGYFIDSYGMTFATEDRSEIFGTAIDDYINGIYDDARFTDDSPIRNKLDYYSRCIRDGFDTKDWPDTMAWESVLTATGAQADMATIKDIATRLGVSISTVSKGLNGASDISEELRQTVLDTAVEMGYSTKRSRKVENRKLALFIENMNYESIDEFGYDVVLGFKQNAFKHKWDVDIIPATPQLQAEEKYDTYILKNGYCGAFLVGFALHDEWMQQLKNTTMPTVLFDNYIENNPNVAYVGTDSYEGIDMAVKHLHNLGHKKIAFINGSLFSLVSDQRQEAFENSMRDAGLEIYPELMGHGYYIPETAQYYVSNFIAAGATAILCGSDAIAKGVISECQLHGFNVPNDISVVGFDDVKFAAALTPPLTTVRQECNDLGRCAYIILNSLIHHIPISRTQLRPRLIERESTARVSTAHAAEEMETRENLRGSGILLSISSLPSPYGIGTLGREAYNFVDLLGDLKQKYWQVLPVGPTIFGDSPYQPSSGCAGNIYFIDLDKLVDEGLLEKEEILEYNWGTDESEIDYAALHQNRCKILQKAFERFDTNAQEFHDFVKKQSEWLEQYALFMTLKTDNLYKNWSEWPSEYRNTQTVALEKYQKKNYNTITFWKFCQYKFFEQWEDLKNYANSKGIYIIGDISFYVGYDSVDVWAERQLFMMSANDTPEYVAAAGPDKYSESGQVWGNPMYDWNAMKEDNFSWWGKRMRVCRELFDIVRIDHFAGIVKAYAVPYGQDKSLSGKWFKGPGRRLVNAINEELEGVNVVADDYTSASLLPGVKKLLAKSGWMGTKVMMFAFDGDPTNEYLPHNYTDSHVVAYIGTHDNETIVGSFSDKTDYELAYLYEYLNIENKSQVPNALIRELYHSTAELAIVQMQDILELGNEARMNYPSTVGHNWRWRMTSKPHRLDNEKIAWIRNIAVVYRRMKKKVLASLLCASMVATMFAGCGSGNGGNGTEKADKKDGGKETITVMGPAEDLDDAQGAWLKTECEAFAKANPDFNIEFKYVTSSESDAKDVVTKDPKAAADVYMFANDQLEPLIKANAIAKLGGDTAEYVKSSNSEAMAATVTYDGDIYAVPYTSNTWFMYYDKRVFSEDDVKSLDTMLTKGKVSFPFDNGWYLNAFYAANGCTIFGDGTDKAAGYDFSGDKGTAVTNYIVDLFANPNFVMDNNEGSLGLAGLKDGSINAYFNGNWNYVKVKEALGEENVGVAALPTINIGGKDCQLKAFLGSKAIGVNPNCKNQEVAVKLAAFLGSEDAQLAHFKLRGQAPVNKDLATNEEVAADPVAAAMAKVSSDCSVAQPIIDMSGYWDAATPFGDAFQNGAEGQITKDNAAQKTEDFNTQLNDSLKMLGANKKKKVSEFATPYTVGNALTKGGATVKLSALVMGLANMAHKQIIKGLIFLAIEIAYIAYMVSAGAYYISMLPSLGWRKQEEVFNEQKQIYEYVAGDQSVLLLLYGVITIAITVLFIYMWCENLKSGYKAECLSKAGKEINSFGKDVKDLFDKNLHKTLMFLPLMGIFVFTVLPLLFMIPMAFTNYSVKGDHLVLFDWTGFASFGQVLGLGGKLGKIFWRVLGWTICWAVFATFLCNFLGLILAIVINRKETHCKAFWRTCFVISIAVPQFVSLLVMRQMFQPQGAVNNLLLEWGWIDNPLPFWTNTMWARVSVILINCWVGIPYTMLQVTGVLQNVPSELYEAAKIDGANAAQIFFKITLPYIMFIMGPYIITQFTGNINNFNVIYLLSAGKPTPVGDSAGKTDLLVTWLYKLTIDNQEYNIGAVIGILTFIVLSIVALVTYRNTKSYKDEEGFMMSSVAKAKKPMSAGRAKKVAKNSLVHIILGILAVVWLFPIFWIIMTSFRAESGAYTKYFFPHGLTFSNYTRLFTETTLLNFPRAFFNTLFISVISCIISTVFVLSVAYSMSRLRFKMRKPFMNLAMILGLFPAFMSMVAVYFILKAIGLTDGSMLRISLILIYSAGAGTGFYIAKGFFDTVPKSLTEAAILDGCTQFQVFYKVILPLSKPIVVYTVLTAFLAPWLDFVFVRVIVGPNDKYWTVSLLLYNMLEKEFINGWFTRWAAAAVVVSIPISILFVIMQRFYVDGLTGAVKGMINNKIGGRNMVGRAVNRLAGRLTAVALTAAMAVSMLAGCAAGGKNTETAAKKEYKPSAMEQMNAKNDPNVIQDNYRTCYEVFVYSFFDSDGDGIGDLKGLTEKLDYIEGLGCNEIWMMPIMPSPSYHKYDITDYMNIDKQYGTLDDFDALITECHKRNINVIIDFVINHTSNEHPWFKAAADYIKSLPDGAEPDSSECPYVDYYNFSKTNAGGYNQLPGTNWYYESQFVDSMPDLNLQSEAVRGEIDKITSFWLDRGVDGFRLDAVLYYNNNNQTETIDDLTWLVNNVKSKKADAYMVGEGWTTYREYAKYYKSGIDSMFNFDFSQQDGYIGKVLNGTANHGASTYGNALVDVENEIKKYTDSYIDAPFYTNHDMGRSAGYYNGDNAEEKTKMAQAMNLLMPGNAFLYYGEEIGMRGTANDETKRLAMRWSGDSKAKGMCVGPQNAEETEQTYDTLDKQMEDPYSIYNFVKQTISIRNAFPEIARGTNTFEKDLSNDNVCIFTREYNGEKAVLIFNPSKDEASVDVSSLGVNDAVAMLQTTKKAPSYKDGAAKLPAYSVLVLKMRSVLIVIFVFFYLLLGLPVLGAMWIIHKFAPAWADMAQLRLVQWAFRVIIFLSGADIEFIGEENVPKDEAVLYIGNHRSFFDIIITYSRCPHLTGYISKQSIAKIPVLGLWMKRLHCLFLDRDDIKQGLKVVLAAIDQVKSGISICVFPEGTRCKNKDDLTEVQSFKEGTFKIATKSKCKIVPMAIMGTNEIFEDHLPWVKKRHVVIQYGTPIDPAALSKEEQKHLGAHCREVIVDMLHEMVMSEKLRKILVVAAGVLVILETTVISGCRANISGTESDRMVEYTVICGDEIPEEFKKQINENKAKAMKLTYKDDEYLYIAEGFGTKETGGYSITVNQFYVKDKAMYFDTRLIAPDKGEKVSNQASYPYIVIKTELSEMPVVFEMEQTEIRKVRASIHQQCGNRVKIQQDLGRNKVDIQEGVIQQAYPSVFTVLIDDEFEQNPPQLLSFSYTDVITKDIRMQLCMDLITQKIRQCIEKVKDMSQVGFDRDYVIKDNKPDVSKVVCQNGQVKLDEIKASGENIWLSGSIEFEVLYTREEVFEGDEPEENIGGNRVEHIKDAIPFQEKLVLQGVCEKDTVRVYTGLDELTVGVINSRKLSVRGIISVELYGEREENLEVAQRIDDKDVEQLMGQMKVLKLDSVVRDIVRIKNVVTLPKTKPNICKLISSLVDMRNLEYTYERDHITLTGECHACIVYLSEEQEICCFEVQEGFSNEIRCEGDNAGNIAWLRTQPAMHQVEAENDYDGELRQLSIEAALAVDGKVWSEETVEVLNDMYSVSCPVKPVFENMKVCSLLMKNDTKCRILEQLYRENSKKRILRICGTKTQAAIAQIKNADTGIIVSGVLQVNCVNIVEDDGCPIEMHTDSVPFEQFVEIPGMDANTCCEVNVQVDQVQVNLLDNSEYEIKGVVSINAIALQQDEVSVITSVEQEKTSSDTEEEAALVGYIVQKDDKMWDIAKRYRTTVENIMEINALTSDSIKPDDRLIIARMMNQKWTRAICTVLTSALVFTGPAVEGITFSGYINSGLEKVYAKTKKQKDAEKKKSQAEQDLKDKKNEINGLKDQQQITADDIKNKSAKLDEILAAQKKLQTDITSKQAEIEQNQKDLAAAQEKQQEQYDAMKKRIQFMYENSAEDNIWTAIIESNGITDMLNRIEYVSDVYDSDRALMDSYQAAVEQVKEIGTKLDKDMNELTAMQDDYEKQQADVEAAIVALENQKEQYASQIAQAQQQADNYQNIITAQGKIIQEQEAAAAAAAAAQAAAARANSSSSSSSYDGGGAGKGGSIAGDYAAGGGKNPGASTGVSGSSVVSYAMQFVGHPYVWGGNSLTNGVDCSGFVHEVYAHFGISTPRYSQAFKSVGQAVSFDNIQPGDVVVYPGHVAIYAGGGVIVEAQSTKAGITANRSVQCHTILAIRRLVMQMEQLQKDMIAAMKARDKVRKDAISSLVSAAKKAAIDEGCRDNIPEELVNKVILKEMKSVKEQIDTCPATRTDLLDEYNTRYAIFEEYAPAMMSAEEVEKELTEQFSDVIATGNKGQIMKAVMPHFKGKADGKVINQVVAKLCAKMQCWLSWPACRHIYAGLDNADITDYDFSGGRYKKLLEKNNYKIKEKVWKRVDMGNVTLDHMSTKIGRNDPCWCGSGKKYKTCHAAFDMKLEKLAEAHHKIPSHSIIKTPDQIAGIKESAKINVAVLDYIGEHIHEGMNTAEIDKIVYDMTTSMGGIPAPLNYEGYPYSVCTSVNEQVCHGFPSKDVILKDGDIINVDCSTILNGYFSDSSRMYCIGNVSPEKKKLVEVTKECVELGLKEVKPWGFLGDMGQAVHDHAFANGYTVVREIGGHGVGLEFHEDPWVGYNTKRGTDMVMAPGMIFTIEPMVNMGKADIYVDDKNNWEVYTDDGLPSAQWEIMVLVTEDGHEVLSWMNKKEVLELKRRLKKDQATFSRLVGCYVDCNHEKVCKFGGKFLTLEEDEYYKYLEISNKVLSGTLGNNLLNLQFPLEEEEVGGRQQILMALRDSELNDETLLDTYYDLVIDTYDEAGNYLILLYLDSYDVMTRTKDNINVDESEEVYKYMLCAICPVTLSKPGLGYLEKEQRIGARIRDWVVGAPETGFLFPAFNDRSTDIHSTLFYTKNTKEPHSEFMTNGLGCGVERTATEQKMAFHSIVRNVLGAEDESTDDKLLDIQQNLSEMADDYAETHDDDDDPFILDSEAMNKVLSDCHVSEEKISRIEKSVNEAFGDKPPIAANVIDSKALAANEIRVEKLALESQVGDLTLELNEKNAQLEEKDSVIQEKNNQIEERTSQLLEKQEEIDNYTAQIKTYDVVLHVKPEKASQIHAQVINGEKCLVIPMRENENATINGVNTNLMEQKMTNNHITIGILAHVDAGKTTLSEAMLYSTGQIRSLGRVDHQDAYLDNDAQERERGITIFSKQARLDISRDTNAADTADTADTARTADVARTADTARTWHVVMLDTPGHVDFSAEMERTLQVLDYAILVISATDGVQGHTRTLWRLLKHYNVPTFIFVNKMDMQDTDAEKVQAELRSELSDGCVDFSSQDLFEELAMCSEPLLDEFMESGELADAHIAQAVAQREVFPCFYGSALKLDRVDTLIQGLSRFMCERNYPDDFSARVYKIGRDDRGSRLTFLKVTGGCLRVRDKIEYKAHGGDEAKGLLIEKIDQIRKYSGEKYDIADVAEAGEIVAVTGLSSTFPGQGLGFEQQSNMPILEPVLNYRMILPDDVNPAAFMEKLKQLEEEDPQLYIVWVEEFKEIHVQLMGQVQMEVLVRLIKDRFGVVVTFGPGSIVYKETIARAVEGVGHFEPLRHYAEVHLLLSPAERGSGITVTSTCSEDVLDKNWQRLIATHVEEKEHRGVLTGSALTDVKVTILTGRAHVKHTEGGDFRQATYRAIRQGLKSTESVLLEPYYSFILQVPMEYVGRAMTDLEQRFARAESPQFATTAAREMATITGKAPVATMQDYVSLVHAYTKGLGHLTLVLWGYDECHNPAEVIAQMHYDSEEDFRNPTGSVFCAHGSGYVVPWDEVPEHMHLPYVYHGDESEEALAASARTQNAFSAEDAQALAGNRRRTSFEKAVSGMSSVELDAQLADVYAREFGMGKNDIAEDQRRKWSGKKKNEYEGLSGKPRTVKHDKHGNPIYPKKSPGEEYLIVDGYNIIFAWEDLKELSRINIDSARDALKDVLSDYQGYKGCHLLLVFDAYKVKGNAGKRETFHNIEVVYTKQDETADAFIEKTVFGIRDRYKVTVATSDGLEQQTVMSLGALRMSARELKEHIEMTKRAGMEAFISGMVVNESMYQLGSVRSAIRELFEYGKKRAAIVGKENVYDFSIGNPSIPAPQIVNDTINELVTDYDSVALHGYTSAQGDVETRAAIAEFLNNTHGTHFNADNLYMTMGAAASLSICFRALTSDAYDEFITIAPYFPEYKVFVNAAGARLVEVPADTEHFQVDFEALEERINAHTRGVIINSPNNPSGTVYSEETIKKLSDLLEKKSNEIGRPIFIIADEPYREIVYDGIKVPFVTKYYDNTLVCYSYSKSLSLPGERIGYVLVPDEVYDKAELYAAVCGAGRALGYVCAPSLFQKMIVKCQGATGDINAYKENRDLLYEGLTRIGYHCFKPDGAFYMFVKALEDDSNAFCEKAKEEDVLIVAADGFGCPGWVRISYCVDGEMIKRSMPAFEKIYKKYNKMAEKETKCCCCNRKKERSEQEYKDLINRLSRIEGQIRGIKRMLDEDCYCPDIITQVAAANAALNSFNKVLLANHIKTCVADDIRAGKDETIDELLNTLQKLMKMSTIITILIIAIIAALVIVGLKETIKHSKGEGACCGGGAMKEDEEATVQLTGEIVTRADVHIDGMHCMNCKNSVTRSLQKMSGVSADVDLKHGVAHVEATRELSDEEITFAIERLDFKVTGIERFMKQYTVTGMSCAACSARVEKAVSKVDGVTSCSVSLLTNSMGVEGSATDAQVVEAVEQAGYGASPKGTATESENDKANNSLEQLKAAQDALVDRETPKLRNRLIASLIFLVVLMYFSMGHMMWGWPLPEFFNGNHVAMGLLQLLLTVAVMVINQKFFISGFKGLIHGAPNMDTLVALGSAASFGYSVYALFAMTAAQVNGDMDAVMSYMHEFYFESAAMILALITVGKMLEAHSKGKTTDALKSLMQLAPKTATVVRDGVEQEISVDAVKKGDIFVVRPGENIPVDGEIIDGTTAVNESALTGESIPVDKQPKDAVSAATVNQSGFIKCRATRVGEDTTLSQIIQMVSDAAATKAPIAKIADRVSGVFVPAVITIAIITIIAWLIAGETVGFALARGISVLVISCPCALGLATPVAIMVGNGKGAKSGILFKTAASLEATGRTQIVALDKTGTITSGEPKVTDIVPDETFFEEIGKHAGECHRKADDLNPYSSTDKALWSRKLLAIAASVEAKSEHPLAKAIMERAKTDEIAVAEVTDFSAVVGNGLTAILAGKMIKAGNLAFVSKFVKVSDDMRAKSVEFSKEGKTPLFFAADDRLCGIIAVADTIKEDSPEAVRQLKNMGIRVVMLTGDNEQTANAIGKQAGVDEVIAGVLPDGKEAVIRKLKKQGRVAMVGDGINDAPALTRADMGIAIGAGSDVAIDAADVVLMKSRLIDVPAAVRLSRATLTNIHENLFWAFFYNVIGIPLAAGLWYPLLGWKLNPMFGAAAMSLSSFCVVTNALRLNLCRVYDPKHDRKATPDRKNKTDKPNESEEKSMTKTMNIEGMMCGHCEARVKKALEAIDAVSEAAVSHESGTAVVTLSSDISDEKLKETVEAEDYKVTSIQMKKYIALVLAAVLVLGIFTGCGNKGNKETESQTDEKATESVNSAENNTEDSTQSSTENHYVADTEQLTTENGQESSVLACPSVNGKLHVEGSKLVDQNNNEVQLRGVSTHGLAWYPQYVTNDCFATLKSFGANVVRLAMYTYESGGYCTDGDRQQLETLVQNGVQYAFNNDMYVIIDWHVLNEGNPNRYSDVAKTFFAKMAQQYASYNNVIYEICNEPCNGATWGDVKFYASEVIPSIRSYDKDAVILIGTPNWSRDVDEAVKDPVTGYDNIMYTLHFYAATHKEDLQNKLKSAADAGLPIFVSEFGICSADGNGQVDIDSANSWISLLDSYGISYVCWNLSNKDEKSALLTPACDKTSGFTYEDLSDEGKWLYGVLTSHVTPVLNMQEYFLKSYIETRAVEIANYIVENNATVRQAAKQFGISKSTVHKDITDADRLLRIDPELAAKARHILDINKSERHIRGGLATREKYLHLPHVHAGMSFKIITISREFGSGGRFIGEQIAQKCGIEFYDKKIIEHVANELGISEQIVANQGEYAPAGSIFSYAFVGRDITGVSLSDQIFNIQQKLIKDIAQKEPCVIVGRCADYILSDRDDVLNVFIEGNKPEKAARIKKLYQKSDDEVKKLLKDVDKKRSVNYRYFTDKEWGSRKNYDLVLNSSVLGYDKCIELIASAYAMDQEKVIVIDFGGQYNQLVARRVRECNVYCEIYSYKIDIEKIKEMNPKGIILTGGPNSCYEENSPSYQKELFELGIPVLGICYGAQLMMHKLGGKVITPEVGEYGKTEITYSANGVMFKDLPSESVCWMSHFDRIAEAAPGFEVVAHTADCPIAATQNVEKKLYAVQFHPEVLHTKNGTQMIYNFVRGVCGCAGTWKMDSFVKNTIEEIREQVGDGKVLLALSGGVDSSVLAALLAKAIGKQLTCVFVDHGLLRKNEGDEVEGVFGKGGLFDINFVRVNAQERYYSKLAGVTEPERKRKIIGEEFIRVFEEEAKKIGKVDFLAQGTIYPDVVESGLGGESAVIKSHHNVGGLPEHVDFKDIVEPLRNLFKDEVRKVGLELGLPDYLVFRQPFPGPGLGIRIIGEVTAEKVRIVQDADWIYRSEVEKAAKEYKEAHGEEPSWMPNQYFAALTNMRSVGVMGDERTYDYAVAVRAVRTVDFMTAEAAEIPFEVLQTVMSRIINEVKGVNRVFYDLTSKPPGTIEFEMIDIYTERKDSKDWIFYNDLYFNLNTGNEEMSQKEIDLIQQVDEAKLTPDKHIETKYGLGTIRNLSSGCKTLLNIVKHPDKVVNVEECGPNVLKIIFTMDNIRIYMSRPTLFDIPDDAKIRFNDSDIVTGGRGYNAWWSKEYQRREADDLMIYKNITFKAAPFSYDLTFDDRITLVGGDSGTGKTVLYEMLEDIRLTDEYKAIKLFNYKSDDFLEAIKQCRDSFIVIDNADCMINDDVRRFINFELSNQYMLFLRNCDGLNVSDKSFKVLKFDNNRITLEEELMRYLLTEDTGAGLHFWKLVNQLFFNDALVVESKESNQGLLDAVLDLNIKEDNKYYIAFDYVVDNQDIRNKYRMLKSITDKSDGKIVILDMICFEYLILAFDKLVEWTGTGKTDKIKIREKVLGVVENHRIDLSRIDDEKTLQYIAGFKRYSTERVMKSLVGEFTQNEKWSVKGTLMGECWYKDCCVSEHTDNLRCGKPEVESGDEKMRMLIRSEKVQRLMRDITLKEMQETVDVLNRGQFIDMLYQLVNTMSDLKQGKIFSIDGTWGYGKTYVLEELERRLSPVVNEDTYDDKFYVFHYNCWQYDYYEEPSVAIISAMLEASENSLEHRINKVAKAGWETAKEILTEVAGEYVKNKIGVNIVEIFQSEKTGIDNQKFKFDQMFAFKKTLDETREKLKRMSEIKTVVIVVDELDRCMPEYAIKVLERLHHLFEGIPNTIVIMAVDSKQLENSVKKIFGNAVDTGRYLRKFISFNLELGVGELQSKYVERYNYYFEKFEERDAAAEELQTLATLCQIDIRNLNKLIEKLDIIHTLAFKGKMSESVLWFELMWGMIKYKISLPDKEGKYSDRSDDLYWLPEIDHATYGGLDNYLSKDIIEYLKEKKNIAMTHTRITGMNSEEIMVSNDFNGEAWHILDQLLARKKTLYMNPVNQTVDIDECKKFIEFAKILWMKQNNPCYLFGMYERDTNSVIVNAINDTYTGTPLTISCEKCNSAVSLDTPDDIAYLYRLAQESPLLYAELACKPNGLQEYVDAMNEFNMQKTFTECCEHQALNNLPTSDEIKELQTDYNNMLTAIIDLLDGANYLWEMLEGVVNALIHRNYLEIGSEVHIDMFDDRIEIYSPGGMVSGISLEGKNLLKIPSKRRNPILADIFSRLKYMERRGNGFKKILADYEGQVEFDETKMPVFDADNDDFTLTLYNLNYGTNYATHVNENVIENVIEISEEKMKQLMPEYSKKKLTKACEILKMISENPNISIDELRIALDVTDRTIARYISELKDKGIIEQKGPDNGGKWKIKMYEKNALNNFKDVLGKYCAINQFVELSKRCFLVEHQNEIQKRDTFVKLATEYAVTLTNYDADSMVCEICRSYIVNVHLCFETFLKDVCWQINKYGKNEYKPRIQEESYLSCAVRNICGNNLSDDMKPLYELCEYYRLIRNTSVHDLCEVDSHEKEYRKLQKYNFKTEAKFSKLVAPNKYEEISFDDFVMFSRSCVELATYIFEKMAYDYTKIALDIPDKQISKWRKYSKNRQEKALCSYIKTLYKVDEEFIEQIPKLISMIIDPIVMMASSYYQNLIKRVLEASTTDNWEIAVREWDIVDCEEDEEHASECVCGKENLRYLFTIRNRETGRSLYPIGSSCIEKFERDDLDYEVDVQMDMYRLAHAMERGERIELTSKYFSKKLLYALYEEGAFAPNKYNRYDGTNDYQFMLDMFNKRNKSEITEQQHRKIRGLIAYSIKPFLRERLKYKMVAWMKIVKSEASGQFFVVGMDVAKDQRLNLTERGMLLTLLSLPPDWDFTVEGMTKILPDGRDRIIMREQEIQKLETQEKELRRTLRSLQSLIKQAEEKLEEAKKEAASIIESAKAKANEWLEKINIRLGLIPKKDLEDKRLELVGYYRACEPYLTNDMRIAINNEDVKGFGALVSRLTASNSDGTVAMSFATTTEMAEKWSISRRRITRLCGEGRIEGAVLKGNTWLIPDSTEKPDDPRRIRRNMQNTFYNIVYSVKEKKFSTIELFAGAGGLALGVEEAGFNTIGLIELDRDACDTLKKNRPNWRVICDDIANISKLDLEDYFGIKKGELDLLSGGAPCQAFSYAGKRLGLEDARGTLFYHYAIFLEKLQPKMFLFENVRGLLTHDHGKTYQTMLEIFENAGYDIQKQVLNAWDYGVAQKRERLITIGIRKDLKEKITFEFPEAHDYKPVLRDILENVPESVGVPYGENKRKLFELVPAGGYWRDIDPELAKAYMKSCWDMEGGRTGILRRLSMDEPSLTVLTSPSQKQTERCHPLEARPFTVRENARCQSFPDSWEFCGKVMSQYKQVGNAVPVNLGYEVANMIYEALEGAEDMSWELSFISEKDFTNHVKDTIDKYGEKLESFDIVRFNKNIVDPIKMIFDKTVYQTSWDEIVGNEIFRQRDKSNNNDIGYFHQRIFQYINNCHVPDNGTEGGWDVIFQVPEGITLPEGDIVHTVYVEMKNKHNTMNSAAAGKTYIKMQSQLLDDDDCACFLVEAIAKKSQNIKWSTTVDGKSVSHKKIRRVSLDQFYALVTGQEDAFYKMCMVLPKVIEKVVNEGGEDVKVPHDSVMSELRRIAKEMNTDDENLAMALAVYLLGFSTYNGFSKVAGNVVDDVDENALKRIYEYARRIVKKDMDVINIISIIVSPIIAVIVGQILQNNSKKRAEKLEIFKTLMVSRGLGWSVESVRALNVIEVVFGDDKNVLNQWKIYYDRLCVENPNETELAKIKSEGDKLLEVIAKSLGYKITWETIQKPYIPKGLTDNLTQQQQYMNNQLSVMNLMNSYMQNMSLNKTNKQEKLMKKIVDKPIKIDLHIHSFFSNHKDGKKVAFNTEENIPVLIAKLRQNEIDMCAITDHDRFSLDLYKTLKLYEGKELLKVLPGVEFSVKFDGKKVIHIVTVFDDKDEEGLKRLEESFVKGIGKEKYIDGAYERDDYFAILKEVGLDFVMIAHQKKTPTSTQKPHKSDVMSLGRETFNELLFMEYFDAYEFRQRDNEIFNKKFSLDNNVKEKLRFVTGSDCHNWNFYPNSSENEDDVRFTYLKALPTFKGLVMAITDYHRINYSGSFWGQGRYVKELCINIHGKKNYVPLSRGINVVIGDNSIGKSLLLHELTEERAITSLPKLKKGYEKYLCQNGIEVETKIAEKDIFKFNYQGQIREIFEDENLKADRYLAEFFPNEIDAQGYRRIVEQELESFYKRLEYKFDYDDKINQLLPLELLDEEEIENELVLGIELETQDISKLQKLVEEFKSVISSMKKGLIANSELDEKDRNHLESEVEFLEMLLQKYSNKYEKAKLERTKINAFNTALKTFKRKYSERQTDQQNRHNAFSEEKKILAENIANLIKTRNSLTPYECLIEETEVEPEVNPVDAFLFVSKIAIEKIDNAYFEEILKGSLKKGNRIQVEEITREDLRKMISRYPTEIDDPLEALKFKIKTRLDADFKPIKAITENGKDVYTDLSAGFNSRIYFKLLSGEEKNKGIYIIDQPEDHISQKAIKEDVLEQFRNMAKRRQIIMVTHNPQFIVNLDVDNVIFLSKEKEVMIQSGALEYEDDEYSILKIVADNIDGGIYTIQQRVKRYEKNIMGYEKGKYYLEYSMPKNDEGRLVIDEKKMELDSVKLYKMFFEKATESIEIIIDNKIDENNDEQVRKKGARVCATIQSLCDEICKEINKKCFEGKYSMYDEIEKNQIFGTKEIKEILDCSPSTARVVMTKLRDMKVVKAVNGKGKGKYVFIEMDISKKDWKLFREKLSGWQENYIEGLVKEYANFLNDDIKPASEKFWELEKRIKEDKRHPGVIMELKKSEVIWDIVRLIRLKVIIYDDLSEFSGELRREVKRILEMNRMRDPIENVTRLQKQLNNLQLENQVLKNILDKAGLSYQNELASIRETDTKEDFDPEQGKRIVHPKEITDRMAKLFFSFFWGRTDVYAKRNVNKNGEAAYYPQCDNFWSDNCHRKLNTHIDCKDCKYCSYTRLDLPTILMHLRGNSYAAKDVIGVYPLFSDGTCRFLVFDFDNHEKDAEKKDFANTDDTWIEEVEAMRDICSLNGIEPLIERSRSGKGAHIWIFFDKPISAAVVRKFGFALLDKGAEQVNLKSFNYYDRMLPAQDSLENVAIGNLIALPLQGRALKDGNSAFVDSNWNAYPDQWNALLSKPKLSEKFLENKIREWTFTADDLEASSDEENREKPWDRMKNFAKSDVDGKMDITLSNGIYVDSTNLKPAMQNKIRRMAAFSNPVFYKNSAIGTSNYDTSRWIYLGKDYLGGYIQIPRGLQDELIANIDKAGIEYTIDDERQQGRNINVEFNGELRPEQNKALKELTKHDNGILHAATAFGKTVVCSAVIAEKKVNTLILLESSALIEQWKDALNKFLIIDEELPQYKTKTGRLRTRKSLIGTLQGAHDSMTGIIDIAMAGSLCKKGEYHKLLNHYGLVLIDECHHCASETIANVLKEVKARYVYGVTATPKRGDGLEKINYMLIGPIRYSYTAKEKAMEQGIQHLVYPRFTRTVPPRGVINGKMHPNEAYDIIHNNDIRDEQIIEDIKNCVSAGRTPVVLSRYKDHSEKLYKRLKDYADHVFLMTGNNSKKEHKKILEQMHQVDKAESLILIATGSLVGEGFDFPRLDTLFMATPVSFRGVVEQYAGRLNRDYAGKENVIIYDYVDNHITMFNNMYMKRLKAYKQIGYEIAGGLHNDKQTANAIYDGDNYAENYHKDLLDANKNIIISSPAISGTKVYELINLLKEKQLSGVQITIVTWAPDSYGFGDAAYWMQLHEEMRKAGFYIKTVEESCERFAVIDQEVVWYGNINLLAKDKVDDSIMRVLSKEIASELMEITFGDNGMSKELQIRNSTVDFLVFTRDAGEDGIEVRVQNGDVWLTQKAISQLFDVDRSVITKHLSNIFKEGELDENSVCAKFAQTADDGKTYNYKFYSLAAIIAVGYRINSERAMQFRTWATKVLDTFTKQGYVLDKSRLINGQIFDEDYFEHLIAEIQEIRASERRFYQKITDIYATAVDYDKNSQVTREFYATVQNKMHYAVHGNTAAEVIVARADHNKEHMGLKSWKNAPDGKIVKTDVSIAKNYLGKEELAELNEIVTMYLDYATRQARRHIPMTMEDWKTKLDAFLRFNDAEVLQDKGKVTAAIAKEFAESEFEKYRVIQDSLYESDFDKLMNDMEKDDAIHMTVQEWEKDFYGNNVTITTRDNECVIYRIRDDSGDSVLTRFEVYPGIALIYNDVHTDYISIKELVGYENILEINHCREGRIEFESSEGECLYVKKGDMAINMKAGVKSYSYFPQSHYHGVTIEIDFDKIEKNQNMIMKEMQLSPKILQDKFCNHKQCIVLHEKQEFEHLFSEIYCVPEQIKKSYYKIKVMEILLFLFALDTTKEKIENRYFNKNLVAKVKEIHQYMLNHIDEKLTIACLADKHQISATNLKKYFKEIYGLSIYAYLKEKRIQKAAELLRETNHEIGKIAGMVGYDNASKFSNSFKSIMGINPSEYKKSVMNKTTKSSRLQGKDLMNIGIYSAIYCVIVTGVAMLGYIPIMMPMLCALVPLIAGVPFMLFLTKVKKFGMIWIMSIIIGIFMILTGMAHYALIVGFFTGLIAELIYKSGNYASQTKAVLTCGVFSMWAWGNFIPLFFNREAYWATRQSFGEEYITTLNSLMPMWLCPVLLIASFVFGIIGGMFGKALLKKHFKKAGIVMKNEMMSSGKGKRKITLDPRTKLALLLMVATFVLGGAGGNELIWARILLAIIPAILLLFSGKVKAFFVFEMLFLAGCLLQYYLLGKLSGFFNFLVLATAGILSQFIPGLMMGYYTVTTTTVSEFVAAMERMHMPKQIVIPLSVMFRFFPTVGEEASSISDAMRMRGISFGGNHPGKMLEYRLIPLMTCSVKIGDELSAAALTRGLGADVKRTNICKIGFRFVDYIVLLGCIITLAYLLLVKIGGFLMIELQNICFEYGSEEQNIAGRGALHNINLHIPDGQIVLLCGESGCGKTTITRLLNGLIPHFYEGNLTGTICIDGKEINDQPLYETALLSGTVFQNPRSQFFNVDTTSELAFGLENRGMEETQILKKVDKTVQELKLEKLMNRSIFDLSGGEKQKIACGCVSVCSPNIIILDEPSANLDLKSMEQLHVMIEKWKVEHKTVVIAEHRLAYIWNLIERMVFLKEGKIEFDFSKEEMQKLTPRDLHQMGLRSNQDVKMVHYNRNENIDRIVFKNFVFGYEKNHNILNLKTMEIDKNSITAIVGNNGIGKSTFLRCICGLEKKCKGIMEIDGKVYKRKERLNEIFLVMQDVNHQLFTESVLDEVLISMKKENEEKALDILKSLDLLPYRERHPVSLSGGEKQRVAVATAIASERSVLLFDEPTSGLDYRHMLQVARLFEKLRNHGKTILVVTHDLEFIEALHANTICLEELQAMQNKERGAVSWLMEFAGEKRIFYIVSVIAAIIGVICSVAPFLFVSDIVIRLIERKTRWSGYLMDGGAIAVLWMLRYLFHGISTCCSHKATFQVLANIRKRLCDKLAKVPLGKVKDTPSGALKNIIVERVDSIETTLAHVVPEFTSNLLAPVVVFMYLCILDWRMALASLITLVFGIVAYMFMMVGYQESFQNTINKTKILNDTAVEYINGIEVIKAFGKAQSSYEKFEVAAKEGADCYVEWMRRCNVPFCIAMVVMPCTALATVPIGGFLFMKGSLSLSTLVMCLILSMGLVTPLITVMSYSDDIGKMGSILGEVTGVLSWEEQLRPINDNKQIKDYSICLENVRFSYREKEVLHGVNLKIESGTVNALVGPSGSGKSTIAKLIASLWDVDSGSIKIGGVDISELSLKNYNRKIAYVSQDNYLFDNTIRENIRMGDLNATDKQVEQAAKDCGCHEFIMALPDGYDTIVGSAGGHLSGGERQRISIARAMLKNAPIIILDEATAYTDPENEALIQHSVAKLIKGKTLIVIAHRLSTIVDADQIFVIENGTVAETGTHNELLANGEIYSNMWRAHMSVKDSEQEVEPRAMLRILKRFFDFCGAENKKKFYKALFLGVVFALLEAVKIPAILLLIDGAIKQNVTESLIVLCLGMLVASLAAASVVKYQITMLQCEAGYYTACGKRIEIAEHMRYLPMGYFNQNSLGQITNITTNTMEQLADVATRVVMMTTGGVLTSSVITVMMLIFDIRIGFIAMVGMVLFFTVNSFLQRKSKALAPVKAAADEFVVEKVLEYVQGISEVRSYNLTGCASKELNEAIDKNRDINTTMELKTVPWMQLQSIILKLMGVAIILTSCGFYLAGSMTLQNCIGMIICSFLVFESLGSAGNYSTLLRIVDLSVSKVENVMRIKEMDTDGKNIIPKNFDIEVENVDFYYDENHAEDAKIINHLSVHIPERTTTAIVGPSGGGKTTLCHLISRFWDVSNGNISLGGENVRNYSVDSLMKNFSFVFQNVYLFEDTIANNIRFGQPEASMKLVMDAAKKACCHDFIMELPNGYDTVIGEGGTSLSGGEKQRISIARAIMKDAPVIILDEATANVDPENEKELMSAIEALTKEKTIIMIAHRLKTVEHADQILVLDKGQIVQQGRHSELLKQTGIYRKFILEREEAVGWKIMQISSRFTMAIHMFACIDTFSDQKMTSDFMAASIGTNPVIIRKILQQLKAAGLIEVARGTGGVTITRPLEQITFLDVYKAVECAPDEQLFHFHENPNQKCPVGKNIHHVLDKRLLEVQRAMEEKLSEMTLADVKKEIAAYTMQKVVEFLQKNPVQYLATVGRDGKAKCRPFMFCFEQDGKLWFCTNNTKEVYKDMQENPEVEVSVSSPEYAWIRLHGKAVFENNMSVKEGCMNNPIVKGQYQTTDNPIFEVFYLENPHGVIADFSGNPPYEFMTKMDYLKLLVDEIHSTTVATIGSDGHPQTRIIDMMYYDEEGVYFLTVKGKAFYDQLMEQQYVAISATKEKIAVSLRGRIKNIGKKNLDIMFERNPYMKKIYPGDTKDAIEVFQLYEAQGEYFDISNPSNIVRNTITIGKAEAVQTGYFVGKDCIGCKLCYSVCPQKCIDISSVPVTINQNHCLHCGRCAEICPKQCIEKRGMIFKKIRKGHVDWRNFLCGTPANDYIFQKDTYEYRIDRAVEYIRNADCILIGAGAGASTAAGISMGGKRFTDNFAEFIEKYGSRYMTDMYAAGFYPFPTEEAKWGYWSKAALLNRFDLPALPLYKELYDIVKRKEYFVLTTNVDHQFYKAGFDENRIFATQGDYGKIQCQKACHPKTYDAQEVFRKMDEARKECLIPSELVPKCPVCGGRMEMNLRCDNYFVEDEAWHEAADRYADFLKQNRNKKVVLLELGVGFNTPIIIRFPFEKMVRENSSYSLIRLNMDEAVVPESFGKRAIGIEGDMERAITDIRGQVLMTQDERREYLIQYLLKEEVRFVRQSIPTDKQGQENLLRSLMNIRPPRPVSGEFLKIQDEYLTERNRERGITDIDTLAPVKSDSRLYIWQGDITTLKCDAIVNACNSQMLGCFSPMHACIDNFIHTYAGVELRLKMHEIMTKQGHEEETGKAKITSGYNLPAKYILHTVGPIIQWKVTKKDEELLASCYRECLRLAADTGAESIAFCCLSTGVFRFPQQRAAEIATNTVKQYLDKDSRIKKVIFNVFKDEDLKIYNGLLMEYDIGSKIKAARLKKKMTQEQVAELLGVSRQTISNWENEKSYPDIISVIKMSDYYEASLDYLLKGEQKMNTYYDYLEESTNVVRSNTNRNKIITMLSYLLIWAVAMIVFWFFTSGSDAMGYSLMFLWIILPITTFVVSIIIGKNDFWGKGKWAITLFFGVMYMLAEYGTFKMANNITFDKLNAPAWGMVVAGTIISTIGMLVGSLFNKQMNKMKKIGIVLLILISLIGTLLGCGKQDVNKDLESIEASEIKQIEHTGTTGGKDGNYSYSFSDDEVIEFINLLNQVKLGDEVDENKALSSGAVSYYTIHLATDETLTISPGKYFKVADRYYEFDNYDELWDEFIVFNSIKMANSDAYLIGKAKYKDHDEKKSGQYEELFGKGLKEIDFETVSNVAVHEIRQIIQQIIQQIILFMRMVYGRYENGQREPSYPTVGFIAQTFNCNIDFLYGTSDKTDPDYIIVSSSNDPELYSLINIIKQDSNVEGRILTYARKLLEKMKHYIEIQRLRTQDVVVDDTLTLEKNTDAFIQGDIISITEKIDGANSSIYYDKKLDRLRCFSSKNELDFSNQLRGFLTYVQSLDREPFIKYPNYIFFGEWLVSHTVIYDDSNYNKWYLFSVYDTVSGRWLSQDFVKKFAEKNDFCYPHELYYGPFISWNHCLSFANAPAYGTQQEGIVIKNQTALEQERGPHILKYVNPEFKETQKKNHKKKLEDPNKLNEKAEAEEYIRMIVTDARVMKCYHKLVDNGILPEKFELKHMKHVAQNLPKAVYEDCVKEELEILKKAGEFGGKLCSKVTMEIIKDKLKIGMWYINGRVEXXXXXXXXXXXXXXXXXXXXXXXXXXXXXXXXXXXXXXXXXXXXXXXXXXXFVEINKMIRNGFYIIKDSFFSDMSDPYLKGNKKQNRPHYYCFKDSNYNGIYWMIPLSSRIDKYKKIVSKRTGKGRTCDIIHIVKLDDNHESAFLIQDMFPISEKYIEREYTIAGNHLRLTSEHAAKEIEQKARKVLGMLKRGIKFTPTQPDIQKIYERLQQDLPATHLMNRHTNIIITAVASLLIVTLAGREFIKNHKKESNDKSSTNVSENTCEDIPDTSISDTCVADTNTPDTSTSEADILDSTYENNKEQFYISEIPDDIFEKMQGKSYKADCTLPRENLRYIHVLHVGFDHQVHEGELVVNKDIADDVLEIFKELYESGYQIEKVRLVDEYDADDEASMSDNNSSAFNFRFISHTTKISKHGMGMAVDINTLYNPYVKTVDGKLSIEPANAADYVDRSRDFSHKIDHDDLCYKLFTEHGFEWGGDWTHSKDYQHFEKMRETILGNHIRKVPSVAVGCMRLSEKSKDEMNHFIHAALEQGAYFFDHADIYGGGMSESVFGEAFADDPALKREDIYLQSKCGIRQGFYDLSKEHILKSVDGILKRLHTDYLDLLLLHRPDALVEPEEVAAAFDVLFESGKVRHFGVSNHKPMQIELLQKYVRQPLVVNQVQFSIPVSNLVANGMEVNMETPGSIDHDGSLLDYCRLHNITLQAWSPFQMPAWKGCFLGSDEYPELNKKLHVIAEKYNVSDTTIAAAWILRHPANMQIVTGTSSESRLKEIIAACDITLTREEWYELYLAAGHLLPMKNYQPDYYNKFKCIADKCSITCCQEWKIAVDDATNRKWKKLSPPDTLSAAHFSADKVSEKSDNLSSYTCHKDGRLVIKLDEKHRCPFLSKDKLCHLVMTYSDEVLSETCALFPREIHRFSRHEERTLMPCCPAVIDLWCEKPVTFPVISETRNNLSTAFSIRDNLIKLISDQGLSVEQALLNGLYILLELYKNQPITNAHIQEYFSGHTLNELNTAMEDIHIPAEDTFIECNELLQDLSVNYRKEGLYTAFLQPVLTEACRYSNIYSQSDNNSMSRTLQTSQKQFGSILTDYDIVFRNYLANELFSDLISPEAASTKKIIEHMIIKMQWIMIEYTAIRQSLFLWYSHNANSPLTYETIREHIVIISRMTGYDDDDIREYLENSFAKLIWDWGYAALIMGIRKMKNLHSDKIKTANLHTTTNHIYTNTKLRKLLVPIIIEQLLASLMGTVDTMMVSNVGSAAISAVSLVDSINILVIQALSALAAGGAILCSQYLGSHNTKGARHAARQVFFVMAFLSVLLSAFCLITRKSLLRAIFGAVEADVMRNSQVYFFFTLLSFPFIGLYDAGASIMRAQNNSRNPMVISVISNFMNIGGNAILIFGFGMGVEGAAISTLVSRIFCAIVVIIQLRRENEPIFIKNYMSIRPEWGLIKKILLIGIPSGIENSMFQFGKLAIQSTVSTLGTVAIAAQAMTNILENLNGIAAIGIGIGLMTVVGQCLGAGRKDEAVYYIKKLSLVSEVVIIASCLIIFILTKPITMLAGMEPASARLCFEMITFITIAKPICWVPSFIPPYGLRAAGDVKFSMIVSCCTMWLCRVSLCIYLCRVWGFGPIAVWIGMACDWMLRSIIFTARFHSRKWLNHHVIDMKKAKKPPLYKSFGYAFEGIFTCIRNERNIKIHCTVAILVVIAGAVLGITPTEWCICLTLFGLVIALELVNTAIESVVDLVTTERKPLAKVAKDTAAGAVLVAAIMAAIVGLIIFMPRIASLLMERLTDGLKKILLAGIGTVAVTAEKSKEVLDEMVKRGELTVEQGKVLNQELKHNIKDTVKKNVNVSVKPQSPEELEELLDKMTPEQIQALKSKLAQMDEADVDQEADESVFEDEDIVTDTSADGKSASGGESQTVDIKIEAEDDKEESVNMDSRLKEMTAVLKKYKLTHGLTPEKFRLILQELGPTYIKLGQIMSLHSDILPKEYCEELMKLCSDVEPMPFEQVEAVIDASFGYSWKDVFASIDKKPLGAASIAQVHRATLKTGEQVVVKVQRKGIHEVMSKDMALLHKAVKLVPPISIKGIVDFDMVLDEMWAVAQEEMNFLLEASNIEEFASNNRDVAFVATPKLYRKYTTSHVLVMEYIKGFNIDDKEGLLKDGYDLEEIGSKLIDNYIRQVIEDGFFHADPHPGNVKIRNGKIVWIDMGMMGRLSEHDKKELSNAVYGIAMNDIGMIEDAVLAIGDFRGEPDRAKLYKDIKIIINKYGSLDMGQVDVAEFIQELLEVMKNNRIVMPHGFTMLARGITQIEGVLADIAPDINMVGIASARIKQEMFKNFDLKGELKKAGKTAYKSAHRMAELPERMAQILEEYQRGQTRINLDMHASDELARLLHRLVRNIVMGLWVMALLISSSIVCTTDMTPKILGIPALGVMGYVFACIIVLYTIVKHFISRRMNIYSILQLCGGLAFFLFGMHVMSGSLEKLAGGNLQKILKEVTSNPIKSLFFGAIVTIAIQSSSALTVMLVGLVNSGIMELAQTVGVIMGSNIGTTLTAWILSLSGIESDNLFISMLKPENFSPVIALIGVIMIMGSKKEKRKDVGIIMAGFAVLMYGMQLMSGAVSPLADMPEFTGLLTTFNNPFLGVLVGAVFTGVIQSSAASVGVLQALAMTGAISYSMAIPIIMGQNIGTCVTALLSSIGVNKNAKRVSIIHISFNLFGTAIGLVVYCIARYAVDLALFNDSISPVMIAVFHSIFNIATTIILLPFSNTLVKIAKKLVTTDNADGQVVLDERLLLSPGLAVKECLEKTNEMAELARDSFKNALDLFDNYSDSKFDDIEVMEERLDYLEDQLDTFLIHLSGKDVSEDGNNEISKMLHAINDFERIGDHAINMAKLAKQIDDNNLEFSKNARKELTVLNNALREILTLTVEAFSKNDLTEAIKVEPLEQVIDDLTKEIRNHHIERLQKGKCDSRLGVFLTDYITNCERASDHCSNIAVCLIQTHNSSFETHDYLNELKAGQEPAFVGQFTMYQDKYHLDEDYKKAKSKKSSKMSDVKSVIESGKAVLGIEFGSTRIKAVLIGDDHAPIATGAHDWENMLVDGIWTYSLDMIWEGISDCYSKMAQDAKEKYGVTIKKLAAIGISGMMHGYLPFDKEDNLLVPFRTWRNTITGEAAAELTEVLGFNIPQRWSIAHLYQAILNKEEHVSKISYFTTLAGYIHWQLTGEKVIGVGEASGMFPIDSKTRDYDAAMLDKFAALDKVKEYPWDIRDILPKVLTAGEKAGTLTEEGAKRLDVSGNLESGILLAPPEGDAGTGMVATNSVAVRTGNVSAGTSVFAMVVLEKALKAVHEELDMVTTPSGDAVAMVHCNNCTSDLNAWVGLFKEFSELFGMDIDMNDIYGKLYNNALTADKDCGGLVAFNLFSGEPVIGLNEGRPMFARKPDARMNLANFMRTHLYASLATLKIGCDILFKEEKVKVDTLYGHGGLFKTKGVGQSILAAAMDAPVAVMETAGEGGPWGMAVLAAYMVNKADGEPLEKYLSDRVFNGEKGIVMQPDPDDVKGFDEYINTYKAAIEAERAMVKALPLMLEELKKQVYEANMELPRRGLITYTWGNVSGIDRETGYFVIKPSGVDYDVLTPDDMVVMDLEGNKIEGKYKPSSDTATHLELYKKYPDIGGIVHTHSPEAVAWAQAGRDIPLYGTTHADYFLGSIPCARNLTTEEINEAYEKNTGLVIIETFENRKINPVYTPAVLCQNHGPFAWGKDAAEAVHNAVVLEEVAKMARLTESVNPDVKPAPDNIKEKHFYRKHGANAYYGQNMVLAVEIIVCCLIFGIYRVIRIKRDPAYKISNMPEKLQKKVMHMRGYRNRNIRIMTDWEKFVKKLPALIFWTIALVILTSIAGATSFSTGFVFALLIWMAVLLFLELVVYCGWYAHTPKVWIKGTEDMAKKTYTNYAHYIGLIPQRALMGIVVAIIVGLVIDVIPRLDNSNYSPKYTEIEDTLQAACDNYRIPGMAVEVVDAEGVLFSGTYGDCKSLDTPFITGSLSKSFTAACIMKLYEGGYLNIDSPVNSYLDAAEVFKNPKDATKITIRQLLNHTSGLGVYQHVGNAKIVGKNGEYTYANVNYDILGLIVEKVSGVSYSEYLTATFFTPLGMTHSSAAYAKAKEDGLITGHNNYFGFSVESDVKYPLSDSWSTVPAGYIASSANDMGKYLQMYLRGGYGILSDKSLSTMFRVTVPMDESGETGYGMGWVRSDKYVETVYNHTGLTENYIADMYLLPESGVGVVFLANTNDYMVTNHLMNKVTSKVVMTLMGYATDELDPKDYVDAHLFYDLVFAAFISVALMEIIKSHKWRTDNSGNLIANIFLHLFLPVGIVIAPIVGGIPYWVIKDYVPDLFIVACLSVVLLAIGGILKLKNRRNSMEQKTPFKELTFSQKIQYIWDYYKIPIFLVIIGIIAVTSFIHGRLAQKNTVLSVLCVNVENSTTEDNGADIFNDFLTDNGYDLSEDEIVLNKNIRVNVDKNGLDYQNMAALTAYFASNEYDICFMDDKTFDYYAKNVCFEDISKYLDKTIIEKYKDRLVYMTIDGKEYPCGIRLSADDNEFVKASGLYSSCTVGVCCDSSHDAMVKKLCGYILQMKASHRKDVIIARLIFAAICLFLIALIATIVITVTSKGGKKKEQDKVQQNAVSESETDSAGDSDTEIGAIYLPQQTTEGTEKTYVTTTSSVNMREKPDKNANIINVIGPDVKIEFVSEDNGWTQVIFQGQTGYVSSDYVKSDMADSTTDSGTSGDADSAAQSQMTGIIWACAATFIAACVPILAKVGTKKTDPALAGSIAGIVLCASIFFYRKDNIMGSSLIALGQRSVIFILLAGLATGLFGICFFKSIYDGYTFQVTAIVKCSYIITLAAGFFLFHNTPDTFDYIAIALMIVGTVILNLDGTGILFALLAAVCASAAHILVSLGGIQLDKGFIAFWCVFIGTLVLIIFTIATGGMKKIGSMSFVDGICLILAGIAYPLAYDFYGRAVSMPGSYAGYIFNLTIIVMMICSSVILKEKISGKKFLGACIFIAALFVIACNMLPFYKTFPFMDYYKNEEAFAKDLRMIKDMYPLDTAMIQSAVEQRMDELEYEGSFIYDEVPDRQRLFDEADRIAGRFISEQSSRCFICTIAGILFNCELCRRRCRYRRYQRFWMSKKVIKPIVLIVVFIAALITFCIITNKGNKDMTTKQADATLPVMSFNLDKIKINTLHGYTTEMDPTKMRDCVIPISDDRKLSLSISTYGMAVDRISYKIRSMDGKRLVADDEISSFSNKDNTIQADISMPNVMDENTEYLLVFTITSGQDNVYYYSRIMQTDGKAAAKVVEFAKKFHDETFIKDDKSFFTTYMETTTGDRNTLAHVDLTSTVSQITWGSMAAAQYTNPVIALKEINDSYDVVTIDYVMSCVDGKGETEYYNVREYFRLRQTESRMYVLNYERTANQIFNSENSFISDSGSVMLGIRSSEAEYRANEAGSVICFVQEGDLYSYDINNGMIIKVFSFRDAEGIDERENWNHHDIKIVSVDEAGSIDFVVYGYMNRGTHEGEVGAGVYHYDGLAHTIDEEAFIPSKTSYEVLKAEMGKMLYLNEKNEFYLMMDDSLYRINLGSMSVKKVVEGLSTGSYCASESNRYFAWVDSANQYSSNTIKVMDLKNGKTFEIKKGNDQYLRPLGFIGEDFIYGQANVADVVSDAAGNTTFPMNGLIILDTSDQSELKTYTPSGGYVEKISVDGYTVTIDLIAQNNGVYAEIGQDTIMNREADSKQKIALDTSQSDTKLTVSAISIAGGKKPDKLKQLTAQMTINSHDTAVDLKFDDNTVHFYVYAKGDVIFASDDISDAIKQANDSMGVVIDSNQQYVWMRARKNAVNAFANIACNETDKDADSVVKSVSAMLTYNDVTVSVSELIGAGSSAVDVLKNNLPDKEILDLQGVSSEDIIFYISQGNPVFAMTGNTSAVLVTGYSSNGALYIYNPDNGATTSMSYEDADRMFYNGGLHFITYMTKMSKKSIVVTKVCEGHDNPIAELVQVACKFDSEITLESDNRKINAKSIMGIMAFNPSDGMTVDIVTKGDDEQEALVAIENFLVCEMRKKNNSKTVKQAVKPVEVKKEETVAQPVSEPKADAKADVKAEVEKAVEKTTEKVEKAVEKTTEKVAEKAAEVKADVKDTVKKTTAKAAKAAKTAKEAKPAKKEPVKPEIIVQYQNSEVDTAAVEERVKAQFVAEGHKAGFIRKLNIYIKPEEYSAYYVINDKFSGRVDLFMLRELRIGDMVAKLPIIQGGMGVGVSLSRLAGAVAKEGGVGVISTAQIGFEEPEFEKDQAKANLIAIKKHIKKAKELACGHGMVGVNIMVALKHYKEHVLAAVEAGADVIISGAGLPMELPELVDEKSHTRIAPIVSSKRAANLILKMWAHRYNRTADFIVIEGPKAGGHLGFSNEQLADMEHMDYDSEIKEIISCAKTYEEKFKKHIPVIVAGGVFTHEDVMHCMELGADGVQVASRFVATEECDASDAYKHAYLNANESDVQIIQSPVGMPGRAVRNGFIRGLEKEKQPITKCYNCLEKCNPATVPYCITKALIAAVKGDMQNGLVFCGANVGRINRMTTVHELMSELVGAMQFNIKVQNDFKNNIRREWALTNGLGGYAGGSVTGAINRTHQGYLIASLHAPVQRYVCFSKTNEKIVTDGHTYDLSSDQFKGGCHTNGIQYIREFTYDGTICFTYEAGDITIKKHIALAQGKNLAAVAYEVQNKGEAAKLLITPLMNFREHSESSTVDSLKFEVQKQEHGFTLIPKAQDDHCIRIAFSGGELIERDNKYICDLEAQTEVDNEVPGLDCAFCPYDVSVDIPAGESMHFSIMCDIVPLEAGNDNSGTVFAKHLVSDNESAFEILRAQLDYTDELIKRSGFTDDFAVKLTVAANQFIAHRLSTGYDTVLAGLPWFTDWGRDTMISYTGLTLCTGRFEKAHDILLTFAKYCKDGLIPNMFPDSGLEPLYNTVDASLWYFYAVYKYLEYVATPDAYEFIKKDIYPCLKDIISTYKKGTDFSIYMDTDGLIHAGSGLDQVTWMDVRVGDWVATPRHGKPVEINALWYNALCTMDMLQTKFGDNDDSYRQLASLVKTSFNKRFWNENTGCLYDVVDEDDDTIRPNQIYAVSLPFTMLDKEREKAIVDTVTDKLYVGCGLRSLDPDHKDYHPIYIGSLSKRDHAYHQGTAWGFLLGGFISAYVKVNGRTKETALCADKLLDPVREHLLNNCIGSICEIFDGDAPHNGRGCYAQAWSVGEVLRCYCEDVLPMLPQAHSMEVFTLIARKKNVALVFVSYLLVALAAISLLTICIGFAPGILFAVVFGLIAYLMIMAQNTEFEYSYFDGELRFAKIKNKSRRKRLGIYSMESVAAIAPAGDRSVYNYENGKELKEIDYTSGQKDVPYYDIVIKSPEENVLIKAELDDKFLTEVEKKYRSKVKRREEMSIAVFDSGVGGISVLKSLVEVMPNEDFIYYGDSANAPYGTKTLEQVRALTCEHAKELILNQHAKGLVVACNTATSAAVRILREQYPDVPIVGIEPAVKPAMLFMENPRVLVMATPMTIREEKLKKLMDRYRHLGEIIPLPCPGLMNFVERGDLYGDDVRQYLEELLYSYSHNEIDAVVLGCTHYPFVRKMIQEVLGDRVRVFDGGNGTAREMKRRLAEKGLLTDSTAAGIVDFQNSLTGQSHEDKIQLCKALFNKKIMTKEKLAIEVIKRLKTAYPRTDCTLEYDEAWKLLVSVRLAAQCTDARVNVVVVDLFKKYPSIEALADADVSDIEEIVRPCGLGKSKARDISACMRMLRDNFGGLVPDNMTDLLKLPGVGRKSANLIMGDVYGKPAIVTDTHCIRLCNRIGLVDGIKDPKKVEMELWKIIPPEESNDFCHRLVDHGRAVCTARTTPHCDMCVLNDICGSVMHNMKLENMNNAYANKKCTNNIYINNRYTIEVTRKRIKNMYLRVKNTDGTLSVSAPYGMSDTEIRKFVESKSDWIERTMQEMLVARQLKEQEPVLAPFMERELRRELKMQLQRLIDKWEPVMGVKSAGFTIKKMKTRWGSCNVKSHHLNFNLLLAKVPSECAEYVVVHELTHLLEPSHNARFWSLMEYYLPESKKLRKQLAGFSAQDMIMEFWDIYDKDKKPTGRTMKKNDWILKDGEYHLSVLGVIHRPDGRFLITQRVMTKAWAPGWWEVSGGAAQAGESSFTAVCREVKEEVGLDVSQCPGGLAYTYHRENPGEGDNYFVDVYRFELDFKESDVQIQTEEALGFKIATLDEIKELAAQGVFLHYDSIKQVFENMALPKDPVMLLSFVNTQLRDNYSGLKELAAAYDIDEKELCDKLAQIDYKYDETVNQFKMETCCDFCAYNEYDEDDEEYYCSVNMDEDDMARFVQSSYKRCPFYRSGDEYRVVRHQMMPVKYVFVTGGVVSGLGKGITAASLGRLLKARGYKVTMQKFDPYINIDPGTMNPIQHGEVFVTDDGAETDLDLGHYERFIDESLTKNSNVTTGKVYWSVLQKERRGDYGGGTVQVIPHITNEIKSRFYRDFTSEDTTIAIIEVGGTVGDIESQPFLEAIRQFQHEVGHDNAILCHVTLIPYIKASGELKTKPTQASVKELQGMGIQPDIIVCRSEHELDQNLKDKIALFCNVPNSHVLQNLDVEYLYEAPLAMEQENLAKVACECLNLDCPEPDLADWKQMVEDLRHPDKEVKIALVGKYTALHDAYISVVEALKHGGIPEHTTVDIKWVDSEELNDDNAAEVFKGIQGIIVPGGFGDRGVEGMIAAAKYARENNIPYLGLCLGMQVAIIEYARHVCMFHDAHSIELDPNTTHPVIALMPDQNGIEDIGGTLRLGSYPCVLDKTSKAYQVYGTENISERHRHRYEVNNDYRTALTEHGMKLCGTSPDGRIVEMIEIPEHPWFIATQAHPELKSRPNRPHPLFHGFIEAANKVNRMDNQGPNNYNYNNGPGNNGSGGNGNNGGNRSGGNGGRNNRGGQGIMAFILLTLVALFVYALISNSISHASTQEKSYSDFIKQLDKGNVKSVEFDSYEIDYKLVDDGHKNYDITYYTGRVADDELVPTLKKAKTSEGKSIEIKAAIPDNTSTWIFNILSFIVPLILLWVLLAFVSKKMGGSMGMGVGKSTAKVYVEKSTGVTFKDVAGQDEAKESLQEVVDFLHNPKRYTDIGAKLPKGALLVGPPGTGKTLLAKAVAGEAGVPFFSLAGSDFVEMFVGVGASRVRDLFKEAQKMAPCIIFIDEIDAIGKSRDSRYGGGNDEREQTLNQLLAEMDGFDTSKGLLILAATNRPEVLDKALLRPGRFDRRIIVDKPDLKGRLETLKVHSKDVKMDESVDLDALALATAGLVGSDLANMINEAAINAVKNGRQLVNQSDLFEAFELVAVGGKEKKDRVMSDKERKIVSYHEVGHALVSALQKNTEPVQKITIVPRTMGALGYTLQTPEEEKYLETKDELLAKITTYMAGRAAEVLVFNSVTSGAANDIENATKIARAMVTMYGMSDKFGMMCLATVQNQYLEGGAGLICGENTASQIDDEVLSIINSSYAEAMKLLDENREILDSISDYLYEKETITGKEFMKMFRDMKGLPDPDEEKDGENNEEQEAAQNDTTLAADPLLRNDTDQPADTNESSEYTAPDDNTLNNMEKTFDIKEELKKLPDAPGVYIMHDKDDVIIYIGKAKSLTKRVHQYFQASHNEGIKKKQMVEHIDHFEYIVTDSELEALVLECNLIKEHTPKYNTMLRDDKTYPYIKVTLGEDYPRVLFSRQMKKDKSRYFGPYTSASAVKSSIDLINKIYKLRTCNRRLPRDIGADRPCLNYHIHQCSAPCQGYVTKEEYAISVKGAIDFLNGDYEQTIKALSDKMLKASESMEFEKAAEYRDLINSVKQVAQKQKITNADGEDKDIIALANDDTDAVVQVFFIRNGKLIGRDHFHVRVGSEEAADDVLNNFVKQFYSGTPFIPREVMLQSEIEDMAVLEQWLSEKRGRRVNIKVPQKGMKEKLVELAYKNALLVLSQDKERIKREEGRTIGAVKEIEGLLGLHGLNRMEAYDISNINGFETVGSMIVYEKGKPKKSDYRKFKLRTVTGPDDYASMHEVLTRRFTHGMEEQKQLEKDGSPQEIGSFNRFPDIIMMDGGRGQVNICLQVLSELGLDIPVCGMVKDDFHRTRGLYYNNVEIPIDRHGEGFKLITRIQDEAHRFAIEFHRSLRSKSQVHSVLDDIEGIGPARRKALMRRYQSLEKIKEADVDDLMQTETMNEKAAQAVYAFFHSATMNALHSVSVAKVAELLDLNNLTKEMNLKERTIECSDVNRPALQLSGYFEHFEERRIQIIGNVEYTYIEKMSDSEKKERYSRFMEFDIPCIIFCRDLQPDEIFMEEAREHGIPVLSTGRSTSSFMAELIYCLGEQLAPCITVHGVLVDVYGEGVMITGESGIGKSEAALELIRRGHRLVTDDVVEIRKINEHTLMGTSPEITRHFIELRGIGIIDVKTLYGVECVKEKQQIDLVIKLEDWKKEADYDRLGLEEEYAEYLGNKVVCHSLPIRPGRNLAVIVETAAVNHRQKKMGYNAAQELYRRVQENLTKNSEVMAIEKKNAWEKYPQGPEREKLFAFAEDYRRFISGCKTERECTAAVYADATGHGFVDLDELIETGKSVKAGDKIIANNMGKGLALFIVGSKSLEKGMNILGAHIDSPRMDLKQVPLYEDTDMALFDTHYYGGIKKYQWVTLPLALHGVICKKDGSTVTVNIGDKPNDPVVGVSDLLIHLSGEQMGKKASEVIKGESLDVLIGSIPGPEKDDDDKDIKERVKANILTILSQEYGVDEDDFLSAEIEVVPAGEARDYGLDRSMIMGYGHDDRVCAYPSYRAMLEIEGTPEYTSVCLLVDKEEIGSVGASGMQSRFFENCVAEVMNLAGDYSELAVRRALKNSKVLSSDVSAAFDPNYPSVMEKKNSAYFGKGLVFNKYTGARGKSGSNDANAEYVARLRNIMDTADVSFQTAELGKVDEGGGGTIAYILANYDMNVIDSGVPVLNMHAPWEIISKVDLYEAFRGYIAFLKEAMNQTFVKSVTEQLPQLGLLQDEPMKKHTTFRIGGPADYYAEPDMSRISKLIEMAKACDMPVTVIGNGSNLLVGDKGIRGLVIGIGKGLSEIEVTEAVAQQSTAQDLTAQDNGHIITAGAGAILAAVAAKAAEVSLSGLEFASGIPGSVGGAVVMNAGAYGGEIKDVLIDATVLTAEGELKTVTRDELDLSYRHSIVPEKGYIVLSARFRLTPKPKDEIKSYMAELRAKRVEKQPLEYPSAGSTFKRPEGYFAGKLIMDAGLRGYSVGDAQVSQKHCGFVVNKGEATAADVLTLIKDVQETVLKQFGVKLEPEVKMIGEFMKFVIVTGMSGAGKSTAMKMMEDMGYFCIDNLPIQLLDKLIDFSNTFHSDVSKVAVGIDVRNGSGIDAIPQTLEQLRQKNFPYEILFLDAEDEVLVKRYKETRRNHPLAGSERINKGIVLEREKLQYLKDNADYIIDTSQLLTRELKIELEKIFVQNEDYKNLFITILSFGFKYGIPSDSDIVMDVRFLPNPYYVDGLRAKTGNDKEIQDYVMQFPEANEFIDKLDDMIKFLIPNYISEGKNQLVISIGCTGGKHRSVTLANELYKRLSGCNDYGLKIEHRDIGKDALRGKMSFSSDVKEELAKQVSKSRHCQLAELAGIIELSGRINEKTKGLELDTENLLLLNKYATLMKRAFGTDTTKALDEQDTGKILAALKITAQPVNRQTADGLLLMQTCCKRAFIRGAFMAAGSISDPNKAYHFEIVCHTKEQARQLQELLCGFDTDAKIVERKGHYVVYIKEGAHIVDSLNIMEAYVSLMKLENVRILKEMRNSVNRKVNCETANISKTVNAAVKQIEDIRLIQKMRGLDDLPAQLREMALLRLEYPDAPLKELGEYLDPPMGKSGVNHRLRKLSAIAEELRMKKKLLFIFNPKSGKGLIKEHLVNIVDIMTKAGYKITIYPTQCQGDAIKKVRKNAKKYDLVVCSGGDGTLDEVVTGMEQSEVNVPIGYIPAGSTNDFANSLGIPKNMEEAARVAVNGTPFPCDVGGFNGDTFVYVAAFGLFTEVSYQTSQQMKNILGHAAYILEGAKHLMDITSYRMKVSHDGEIIEDEFIYGMVTNSLSVGGFKGISGPDVLLDDGLFEVTLIKNPKNPIELNKILAGLANRENDNELIYSFKTSEMHVESEEEVPWTLDGEFGGSHTDLTITNLNKQITIMCMLVSATEMLKKAKEGHYAVGQFNINNLEWTKSVLLTAEELKSPVILGVSEGAGKYMTGFGTVAAMVKAMHDELGITVPVALHLDHGTYEGCYKCIKAGFTSIMFDGSHYPIDENVAKTKELVAVAHAMGMSIEAEVGSIGGEEDGVVGMGECADPDECKRVADLGVDMLAAGIGNIHGKYPANWQGLSFETLDAIQQKTGVMPLVLHGGTGIPADMIKKAIDLGVSKINVNTECQLSFADATRKYIEAGKDLEGKGFDPRKLLAPGAEAIKATVKEKMELFGSVGKAEMSEQEYFNVADIFGENVFNDAVMQERLPKKVYKKLHEVMDEGKELDLETADVIAHEMKEWAIEKGATHYTHWFQPLTGVTAEKHDSFITSPMPNGKVLMSFSGKELIKGEPDASSFPSGGLRATFEARGYTAWDCTSPAFVRQDAAGATLCIPTAFCSYTGEALDQKTPLLRSMEAINDQALRLLRLFGNTTSKKVTPSVGPEQEYFIVDREKYLQRKDLIFTGRTLFGAMPPKGQEMDDHYFGAIRERIAAYMRDVNKELWKLGVSAKTQHNEVAPAQHELAPIYAECNVAVDHNQLIMETLKKVAGRHGLQCLLHEKPFAGVNGSGKHDNWSITTDDGINMLEPGKTPHDNVQFLLVLTCMLKAIDEHAALLRAAAADVGNDHRLGANEAPPAILSIYLGDQLGDVLNQLIATGTATHSLKGEKLETGVKTIPDFMKDATDRNRTSPFAFTGNKFEFRMVGSQDSVAQANIVLNTIVAEAFSDACDILEKADNFDLAVHDLIKDYAVEHQRIVFNGNGYSDEWVAEAERRGLPNIKSMVDAIPAYVAPESVAAFEKFGVFTKTELESRAEIEYETYAKTINIEAKAMIDIAGKQIIPAVIKYVTSLAQSVNSVKSAVADADVSVQSELLTESSALLSDAQVALAKLKDETAKAGAMEEGREQAVYYRDVVKTAMDALRTPVDELEMIVDKEMWPMPSYGDLIFEVMTEEISGVIFGVWFLIGAALVFWMQAGFAMVEAGFTRAKNTGNILMKNLMDFCIGTVVFILIGFSLLLGEDVLGFIGKPGFDIFTSYKDFDWSNFVFNLVFCATTATIVSGAMAERTKFISYCVYSGVISAVIYPIEAHWIWGGGWLSQIGFHDFAGSCAIHMVGGISALVGAAILGPRIGKFTKDKNGKITKVNAIPGHNITIGALGVFILWLGWYGFNGAAAKSVEQLGSIFVTTTIAPALATVVCMIFTWLKYGKPDVSMCLNASLAGLVAITAGCDVTDALGAIIIGSVAGLLVCFGVWFLDNVLRVDDPVGAVAVHMMNGIWGTIAVGLFATNSAPGYSIADSKGNELVGLFYGGGFKLLGLQLTGFVSVAAWTVVTITIVFLVIKATLGLRVSEEEEIIGLDPTEHGLPSAYAGFAIMDVSGDVMDVNENTDLGSSEYATASKAKKDAAVPVVNAATPASASGIHKVVIISKLTKYDKLRKAMNDLGVTGMTVTQVMGCGIQKGAGEKYRGAELDATLLPKVKVEVIVGKIPVEKVIETAKKTLYTGHIGDGKIFVYDVAQVVKVRTGEEGIEALQDVEMNYGKKATMQLLRKYDNKSSKVKNKFKLIVLKILLVVVIVAGAAGISSGIGVMKGIIDSAPDISKIDVTPTGYSTTVLAANGEETATLVGQGANRQYVTIDEIPLDLQHAFVAIEDERFYDHNGIDLHGIGRAFISGLSKGRFSEGASTITQQLIKNNVLTSWTSETSFVEKLQRKIQEQYLALELEKQVNDKDWILENYMNSVNLGANTLGVQAASKKYFNKDVSELTLSEASVIAGITQNPSGYNPITHPDKNAKRREKVLNNMKDQGYISKAQYDEAMADDVYSRIAEYNTTGSGSVNTYFIDALIDNVFDDLTAAGYSETEAYKLIYKGGLTIKSTQDLTMQTICDEEANNPSNYPSDAKYSFQLSFEVKKADGSYKTYTNQTMLSFYKKKTNNDDFSINYSSPDECNAAIAQYEQDVLEEGDSIVEGSEAVNITLEPQVAMTVIDQSTGEVKALVGGRGDKSGNRTWNRATDTCRQPGSTFKIIGCYAAALDAGGKTLASVQDDAPFTVGSKTFNNYDKSFGGFTSIRWAITKSINIVTVKTLQDIGVELGYKYAEDFGISTLTDSDKNLSLALGGLTKGVTNLELTGAYATIANGGVYLEPKFYTQVLDHDGNVLLDKTTTQDTRTVIKDTTAWLLTDAMKDVLTQGTGKLARFDSQIAQAGKSGTTTSNRDCLWAGYTPYYTCVVWGGYDDNSKQSGKLTSYPKNIWRNAMSRIHEGLETKDFVQPDGITNTTVCSKSGLVPLEGTCDNDPRGSMLTTEYFDTDTVPTDSCDHHVALEICADSGAIAGPYCPNKTSKVFITGAVSGSPEYEFMADDTFMNTVCTLHDATSLINSSPTTTDPTNSGTTPGSTDGTAAGAQTGEAGTGTGAGSGAGTGGSGSGGTDTGSSGSSGNSDRMHECNQAISGWKEYHMSENTISLYVYKGGQGEITEKKSRFIATVRPVESEDEAVSFINETKKKYWDARHNCSAFVIGKRQELTRCSDDGEPAGTAGRPMLDVLLKENIHNAAIVVTRYFGGVLLGTGGLVRAYQQATKAGLSASEIIEKKDGAVLFIRTDYTGIGRLQYLFAQEKITVMDTAYEADVLVKAVIPENDKKRIEKTIIEQTNGTAKLEWGDEVTFAEYDGEVLLFKNMNKNFLRIINLIEELGSEKKTPITIQQYQDIINKSSNLWMSNGVDEAFRFIRSYFNFIDMAFSFDSRIRYSEVDSSCRLSLTGLTNYFQDCSVFHSQSHDVGIRFLADNHIAWVLSSWQICINRLPLLNEQVKISTWAYGMKAFYGYRNFTLEDAGGSTLAYANSVWVLVDTRTGRPVKVPQEFADTYGLEPQLEMECAKRKLHIPDDMEKKGEIVVPQFFIDSNHHMNNEKYVMLAQQLLPNDFEISELRVEYRKEAKLGDTVISYVKYTSKSVTVVLADTDKKPYSVVEFLSKPVPGKMRLGEYQELVCVKKVDFGIYLSTSSASEERVLLPAKQIPDGVKQGDKLKVFVYKDSNDRLIATTNEPKLTLGGLSVLTVKEVTKIGAFLDWGLEKDLFLPYKEMVRKVSAGDEILVTLYIDKSQRLCATTKGIYHMLSTDSPYKKDDMVSGRVYDFSDNFGTFIAVDDKYSAKIPVFENAAYLKLGDVIEAKVTDVKADGKLDLTMREKAYIQMDSDAEKLLELLDSYAGVLPFSEKASPEVIKRETGLSKNAFKRAVGHLYKERKIDLTDGKIRLKKMKNVISTDKAPAAIGPYSQAIEVNGMVYTSGVIPVVPETGEIPEGSQAQAKQAFTNLSHLLEAAGTSMDNVVKTTVFIKEMNDFGAINEVYATFFNGAYPARSCVEVARLPKDVMLEVEAIAVKMKVNYVKLTAGVLTGFMALSSVPYAVYAAGPTAGVASYTSDIVSTSNTLTAGVTSMLTDVMLKGDDTSETATDVAATDAEPVKSAYADTAVAQVSDSVNIRASADENSESLGKLYNNGIGTVLETTDNGWYKIQSGSVTGYVKGDYVVVGDDALVQSAGRRVATVNTETLKVRTTASTDAEVLGLVSGEDDLTVVDESTAGWVGVSTADGTGYVSTDYVTLDTEFTYAESKEEEAARLAKEEAERKAAEEAAKKAEEAARKAEEAKAAKAEAKKSSKSSSKSSSSSSSEKSYSAPSGSNGQAVVNYASQFVGNPYVYGGSSLTNGTDCSGFVMSVYAQFGISLPHSSSAMRSVGYGVSTSDMQPGDIICYSGHVAIYCGGNTIVHASNPSDGIKYTSPANYKSIIAVRRIFMFKNGTNLNRMENWAVKRNFYHIYQNSNMHKKVDILNPVNSDWGMIKKIDIAGLQLDNYTVREMIMRVDRRISEKIFTTIEEVNMDTLALAESDEEVKQALEACDYTVIADEGILRAVSADTLQRRHEIEDHDFFYELFKRLERNDKKIFVIAESQKAVDEAEEFLIGLFDRVRISGKGVLDDSPGCSENLVNEINIVSPDVIASFLPSPAQEKFLLHNREKLLMNLWYGIGNNKFMGKKHGFIGKIRKMLDVKRLTHLINTYEHRQNSSIMISNQILQNTIDGLKGITRTDLCVIDVEGKILAATFPNAEAFIEPAQAFVASPADSQVINGCQFFKVFDDHQLEYVLLAYGDSEDVYMIGKIASFQIQNLLVAYKERFDKDNFIKNLLLDNLLLVDIYNRAKKLHIDIEVRRVVFIVETNREKDGNELEKIRSLFGGKSKDFVTAVDEKNIIVVKELAENETYDDLRKTAEVILNLFRSEADGVHIAYGTVINELKEVSRSYKEARMALDVGKIFFEERNIIAYSQLGIGRLIYQLPIPLCKMFIKEIFDGKSPDDFDEEILSTINKFFENSLNVSETSRQLYIHRNTLVYRLDKLQKSTGLDLRVFEDAITFKIALMVVKYMKYMESMDYMIKLEHVSKAYSAGIPALNDVNLEIDDGEFVFVCGDSGSGKSTLIKLLLKELDPTDGTITVDGRNLARIRHKQVPKYRRNVGVVFQDFRLLKDRNVYENVAFALKVIGASTAVIKKKVPQMLSMVGLAAKYKSKPRELSGGEQQRVAIARALVNEPSMLLADEPTGNLDNNNAWEIMKLLEEINEKGTTVIVVTHNLEIVKVMKKRVITIKKGLVVSDSKDGDSDEDMRINTLFYSIKQGFKNIFRNKMFSLASIATMAACIFMFGLFYIVVTNFSSMVKTAEEGVAVTVFFNEGTTEDVIKADKAQIEKRAEVGKVDYQSAADAWSDYQKEYFEGYDDAAASFGDDNPLSNSANLQVYLNDVSAQQTLVNYIKGMEGVRKVNQSQDVANTLTDLNKLISYVSGGIILILLCVAIFLISNTVTTGIAVRREEIAIMKLIGATDFLVRSPFVVEGILIGLIGSAIPLGLLSVMYGRICAYIANKFSFIGNMMTFIPTKEIFSTLVPVALILGVGIGFLGSRFTIRKHLRVMDNSNNNGLEYDDNSDMSDKKPHRKGFRNGFGVGIATGIVTTIVLGLIVLFAYTMITGRSVHTVAKSADVLDDKTVQKIDELANYIDEYYYEDYDKDDLENGLLHGVMEGLNDPYSVYYTADEYKELQISTTGTYYGIGAALKQDPDTKQVTVSKVYSGTPSEEAGLKKDDEIVSVDGVEATSEDLTKLVAKIRGKEGTKVTLEIRRGEDTDPFTVEVERKNVELPSVDSKLLDNGVGYIQVSEFQTNTASQFEDALDGLTNQGMKGLIVDLRANPGGLLTAVTEMVDRLLPAETVGKLPAGTVVYTKDKNGNIQTFGDDDGKQIDCPIVVLVDENSASASEIFAGAMKDYNEDGYIDATLVGKKTFGKGIVQTIYNLSDGDAVKITTSKYYTPNGHNIHKKGIEPDVEVDYEYTGDTNADYDMQYDVQLQKAIEVMNEKLKMKSLNKIACFLMLCWMVVIFMFSAEPDTESSELSGSVSYRIVSVVNTITASHWDEKELLDKAELIDYPVRKCAHMSEYAILTLLGFLTFSFLYGRRRFLIPIGVTFLYACTDEFHQLFVPGRAGRFTDVLIDTTGGIIMLLFIALVTHVARKKHTAGAVKTKTMEAPDFWDDPEKSQSKMKELKSMKDDVATYAKLKEQYEDIETMIEMGYEENDESLIPEIQQMLYDFESTYDGIRMKTLLSGEYDKCNAILRLNAGAGGTESCDWAAMLFRMYSKWADKKGFTLEVLDSLDGDEAGIKSITFQVNGENAYGYLKSEKGVHRLVRISPFNAAGKRQTSFVSCDVMPDIEEDLDIEVKDEDIRIDTYRSSGAGGQHINKTSSAIRITHFPSGIVVQCQNERSQHMNKDKAMQMLKAKLYLLKQEENAAKETGIRGEVKEIGWGSQIRSYVLQPYTMVKDHRTDVETGNADAVLDGNIDIFINGYLKWLATRSDMGLVITVAILAVLTAAGVTVYIKVRRLSESLLGTPDVTEGINRIRENVSTTPKSVSGMTRLMEPQIKRDFPEFVWEQFKRMSERVLVSALCAITTEDIYKLDREASDEVRQQVQVRIDSNEAAGFTEHFDEIRVHQTEISNYVKRDGRCVISIQSAVEYFYYKTASGKLISGDKEYKKQTRYNMELVYIQDIDMLDNAGIGSAVGTTCPNCGAPVRSLGAKKCEYCGSYVEPVNIKVWKLQSFHEVDYNHIMGIIKAVKQAIGGGFADTWQEVIEPDNIGDQTVYARGVLVNRGQNKKGSDDIVSNGSIIHVYDNQFMILVDGGKIVDYTAEPGYYKVSNSSMPSLFNGQFGDSLKETFDRVRFGGQTPQSQKVYYINLQEIKGIKFGTRNPINYYDTFYNAELFLRAHGTYSIKIVNPLQFYAEAIPKNMDHVEITDINEQYLSEFLEALQSAINQMSADGTRISFVTSKASELGRYMAKCLDESWNQMRGMEVQSVGIASLSYDEKSQELINTRNEGAMLSDPSIAQGYMVKNMSEGVKNAGSNSGGAMQGFMGVGMGMSTMGNMMNGFTQMAQNNRSAGMNAPGNGAAGVASGATQQEDASGWTCECGQKNTGKFCSNCGKPMPQEITEWTCECGQKNTGKFCTNCGKPLPVNTEWTCECGQKNTGKFCSNCGKPRAMAEKSNYFVLRAKAVPEVLLKVVEAKRLLDSGKLESVQEATDAVGISRSSFYKYKDDIFPFYEGRKGKTVNLVIQMDDEQGILSVVLKSVADAKANILTIHQSVPVNGIASLTLSVDVFPESDDVDDMAKQIESLKGIHYVKILAREMKIAVMGYGTIGSGVVEVLEINKEKIAKRAGEPIEVKYVLDLREFPGTPIENKIVHDYKVIAEDPEIGIVVETMGGVEPAFTFVKAMLEAGKQVATSNKNLVAAKGAELIKIARDHGVNFQFEASVGGGIPIIRPLNKCLTADEIEEITGILNGTTNYMLTKMTEEGADFDEVLKDAQDKGYAEKDPTADIEGHDPCRKIAILTSLVAGQQVDFEDIHCEGITKITPEDIKYAKAMHRAIKLLASSRKVGDSYTCLVAPYMIDDTHPLSGVNGVFNGVFLRGNVLGDAMFYGSGAGKLPTASAVVADVVDMTKHQNTNIYIDWKPEKLTLVSYDDSVNSFFVRTDSPKSEVEAVFGHVDYIENVVDGEYAFTTGDMTEKDFADKASKINVINRIRLMETETVTGYVDHIIYRNAENGYTVLALVVNEEELTCVGTFSDIAEGENIEVHGEYTEHATYGRQFKVVSFEEKEPEDEMAIERYLGSGAIHGIGLALAARIVRRFKKDTFRIIEEEPERLAEVKGISQRKAMEIADQVNAKRDLREAMIFLQQYGINMNLAVKIYNKYGGEIYSVLKENPYRMADDIDGVGFKTADEIAARVGIKTDSDFRIKSGIQYVLQQAAMDGHTYLPMEELTRRAVYLLGVESSQVEAHYMNLAMDRKIVMQLKDDITQIYANTFYYMEANTAAMLKQLDVTYDVPDIEIEAAIRNIEKKTEMELDEHQVEAVKEAVRNGLLVITGGPGTGKTTTINTIIKYFELEGMDIFLAAPTGRAAKRMSETTGYEARTIHRMLELNGGMDTGSSAGFERNERNPLETDVIIIDEMSMVDISLMYSLLKAVVAGTRLILVGDVNQLPSVGPGSVLKDIIDSGAFHTVKLTKIFRQASTSDIIVNAHKINNGEEVSLDNKSMDFFFLKRYDADKIINVTLQLIKQKLPKFVNATEYDIQVLTPMRKGLLGVERLNGILQAYMNPADKSKREKEYRGTIFREGDKVMQIKNNYQIEWEIRTKFGLCVDKGMGIFNGDTGIIEEINDFAETMTISFDEGRKVEYPFKLLEELELAYAVTIHKSQGSEYPAVVIPLLSGPRMLMNRNLLYTAVTRAKKCVTIVGDEQTFYEMIQNNSQQRRYSGLRDRIVEETIMKIRKLTNEEIKGACAFAVSIYNIAIRGCFRTQDCHRYFDEYMDADRLTDEERTGVLVVFGAFDSNVLCGVCGMTNEGHITMLYVHPQYLRRGIGKKLLERVRIYARMQLKLMQVSVNAMPAYTADYFRCVGFKSAYQGGFCNGQGDMYVPMTAKSIYQVEYTPRHIADKTFIAISVGFTCLVFFSGVIYAVCAGLTPMKAFLILEDGNVFTGTSIGSTREVISEIVFNTSMTGYLEVLTDPSYAGQAVVMTYPLIGNYGITPDMESERPWPDGYIVRELSRMPSNFRCEGTIQDFLKKNDIPGVAGIDTRALTKILREKGTMNGMITTNENYNLDEIIPKLKAYTTGNVVDKVTCTEKKVLKGQGKRVALMDFGAKNNIAKSLNERGCEVTIYPAHTTAEEILGDNPDGIMLSNGPGDPKECVDIIKEIKKLYDSNVPIFAICLGHQLMALATGADTHKMKYGHRGGNHPVKDLATGRVYISSQNHGYVVDTDKLDPNVAEPAFINVNDGTNEGLKYVNKNIFTVQFHPEACPGPQDSAYLFDRFINMMGGNQMPRNNDIKKVLVIGSGPIVIGQAAEFDYAGTQACRSLKEEGIEVCLVNSNPATIMTDKQIADQVYIEPLTLESLKEIIIKEKPDSILPTLGGQAGLNLGMELAECGFLDEQGVKLIGTTAETIFKAEDRQAFKDTMEKIGEPIAASQVVKNIEDGIAFTNKIGYPVVLRPAFTLGGSGGGIAHDEQELIDILSNGLRLSRVGEVLVERCIAGWKEIEYEVMRDANGNCITVCNMENIDPVGVHTGDSIVVAPSQTLGDKEYQMLRTSALNIINELQITGGCNVQYALNPDSFEYCVIEVNPRVSRSSALASKATGYPIAKVTAKIALGYHLDEIKNAITQKTYASFEPMLDYCVVKIPRLPFDKFLTAKRTLTTQMKATGEVMSICNNFEGALMKAIRSLEQHVDSLMSYDFTGLTDDELEKQLAVVDDRRIWVIAEALRRGVKYEHIHEITKIDLWFIDKIAILVEMENRLKTEELTVDLLKEAKRIEFPDNVISQLTDIDEADIKKMRYDNGIVAAYKMVDTCAAEFEAETPYYYSVFGSENEAAETNPQKKVLVLGSGPIRIGQGVEFDYCSVHCTWSFAKEGWETIIVNNNPETVSTDFDIADKLYFEPLTAEDVESIVNIEKPDGAVVQFGGQTAIKLTEALMKMGVKILGTKAEDVDAAEDRELFDEILQKTGIPRAAGGTVFTAEEAKKVANEIGYPVLVRPSYVLGGQGMKIAWNDDEIEEFIGIINTITQDHPILVDKYLMGKEIEVDAICDGTDILIPGIMEHIERTGVHSGDSISVYPAHTISEKAKETLVEYTKRLAQALHVVGMINIQFIDMDDNIYVIEVNPRSSRTVPYISKVTGIPIVDLAARIIMGETIKGMGYTPGLAPTADYIAIKMPVFSFEKLRGAEISLGPEMKSTGECLGIDKTFNGALYKAFEGAGVELPKYKQMIMTVKDADKPEAVGVAKRFEKLGYKIYATRSTAKYLQEHGVNALRVNKISQESPNVMDLILGHKIDLVIDTPTQGNGDKTRDGFLIRRNAIETGVYCITAMDTANALAHALETASDKKTPVDIATVKNLMAKKVVIASACRTAIGKMGGALSNTPAADLGAIVIKEALNRAGVAPEMVDEVKMGCVIQAAQGQNVARQASIKAGLPIEVPAITINVVCGSGLKCVNDAATMIKAGEADIVVAGGMENMSMAPYAMTKARFGYRMNNATIIDTMVNDALTDAFNHYHMMITAENVCDKYGITREELDEFSANSQQKCEAAIAAGKFDDEIVPVPVKVKKEIVEFKKDEGPRAGTTVETLSKLRCCSGKEGGLVTAGNASGINDGAAAVVVMSEEKAKELGVKPLATWVAGALGGVEPEIMGVGPVASTKKVLAKTGLTIDDFDLIEANEAFAAQSIAVARDLGFDMSKVNVNGGAIALGHPVGASGCRILVTLLHEMQKRGSNRGLATLCIGGGMGCSTIVEKYMKVGVIGAGTMGQGIAKAFAQVDGYEVALCDIKQEWAEGGKDKIAKGYARLVAKEKMTQEKVDGILASITPGLKEDLCKDCDLIVEAAFEDMQVKKTTFAELDKIAKPECIFASNTSSLSITEIGNGLTRPLIGMHFFNPADRMKLVEVIAGVNTPVETVDAIKKIAEEIGKTPVQVNEAAGFVVNRILIPMINEAAFIKMEGVSDIAGIDAAMKLGANHPMGPLELGDFIGLDICLAIMDVLYNETGDSKYRACPLIRKMVRGGNLGCKSGKGFYVYNADRTKTPVDAQMDFTLDQKHEMARDLFKQFAETEVKPLAQETDETEVFPAETVAKMGKYGFMGIPVPKEYGGQGCDPLTYVMCVEELSKVCGTTGVIVSAHTSLCIDPIMTFGTEEQKKKYVPDLASGKKIGAFGLTEPGAGTDAQGCQTKAVLDGDEWVLNGSKCFITNGKVADVYIIIAITSITEDKRGRKKKNFSAFIVDKGTPGFSFGTKEKKMGIRGSSTYELIFEDARIPKDALLGKEGRGFPIAMHTLDGGRIGIAAQALGIAEGALERTIEYTKERKQFGRSIAQQQNTQFKLADMATRIDAAKYLVYAAAMKKAEFAKNPKVSYSVDAAKAKLFAAETAMAVTTECVQLFGGYGYIREYDVERMMRDAKITEIYEGTSEVQRMVISGSLLRMNIVVCIKQVPDTKGGVKFNPDGTLDRASMLAIMNPDDKAGLEAALRIKDETGAKVTVLTMGLPKADAILREAMAMGADDAVLVTDRVLGGADTWATSTTIAGALRNLDYDLIITGRQAIDGDTAQVGPQIAVHLGLPVISYAEDIKVEGDSVVVKRQYEDRYHVVKAKMPCLITALSELNEPRYMTPGGIFDAFDKEVTVWGRADLKDVDDSDLGLKGSPTKIAKASDKVPKGAGEKVNLDPTESVNYLMEKFKEKHIIMGLEEYKGVYIYAQQVDNKLSDIAFELVGKAKELAADLNTEVTAVLLGSNVKALATELGEYGADKVIVVDNPALETYRTEPYAQALVSVINEYKPEIMLVGATAIGRDLGPTVSARVKTGLTADCTKLEIGDFPINAMPGQEQKHNQLLMTRPAFGGNTIATIACPDNRPQMATVRPGVMQKLPKEAGRAAEVIEFNPALEENNRYVEIMDIVKAVGNVENIMDAKVLVSGGRGVGSAENFEMLRDLASCFKGGMVSCSRAAVENGWLAQDYQVGQTGKTVRPQIYFAIGISGAIQHVAGMEESDLIIAINKDEDAPIFDVADYGLVGDLKKIVPQLTAALKEANADAMMPVNEVSGYRKFGGCLDAYMDAYLEPNMMETSKQSERTIKIKMCGIIGFTGRLEAQKILTEGLAALEYRGYDSAGIAYFKDTGKISIRKTVGKVKDLLAICDDENNSTCGIGHTRWATHGGVTNANAHPHKVGNVALIHNGIIENYHEIVNKYDLADSLISETDTEVAAALINKLYDGDPKATIKKAVAELQGSFAFCIMFKDQPGKIFAVRNVSPMVATYCDDGAFIASDLTAFIKYSKRYFILPEYTIMTMTADGIEMEDLEGKKVEPDYLEVNWDVTAAQKDGYPHFMIKEIHEQPTAITRTITPRIKDSLPCFEDDNIPDSFFEDISDITVVACGTAMYAGMVGKALLKNKFGIPVSVEIASEFRYEQPVLTDRSMVIFVSQSGETIDTLEALRLANKYTKKTLSIVNVKGSTIARESNYVLYTHAGPEIAVASTKAYTVQVASFYLIGCKLGLVSGRMTKEEAKTFIENLQEVPNLIESVITQAPEIEQLTKRMTNAANAFYIGRGLDYALSMEGALKLKEISYIHAEAYAAGELKHGTIALISEGVPVIAVATQSHVYSKVISNIREVKARGAYVILLSKDKDITDKSICDVHISLPQAPDEFVIFESVIICQLIAYYTSTGKGLNPDQPRNLAKSVTVEMRNSKTNELVLTGLFTAIIIIMAFTPLGYIPLVVINATIIHIPVILGSLFCGPKKGAFLGFVFGFTSCLKATIVGGTLSSFVFSPVLAASLVGTSGIFKSLFIAFVPRILVGVIPYFVYIGIKKVLASEKKNLWGTVLNVLMSAFLAFGVYAFLGKMSESLSQAAALGIGIAVGAVVFIVVEAVFIRKSTQVIPFVYAGVAGAMTNTLLVMGSIFVLYKDAYADAIGVAGNAVLGVITGVISFNGVIEAIVAAIIVYLVGLVLNTIKPIAAKMHEIDIMDIGGFKIGQAEDTKGLTGCTVFLFDKQSPAGVDIRGGGPASRETPLLNPVADAKGIHALVLSGGSAFGLDAAGGVMKYLEERDIGFDVGVTKVPLVVQSCIFDLVIGDKNARPDGKMAYKACENASYDTFLQGNYGAGMGATVGKYMGRERSMKSGIGAYAVQLGELKVGAVVTLNALGDIYDIDTDKKIAGALDENGLLFDDETAYFEAAAKIQNMFTGNTTIGTIITNAKLDKTALNKVASMAHNGYGRAIRPVHTMADGDSIYAVSVGSVPADINLVGPMSAYVMAKAIANAARSAKSVDGYKAFCDVNKKMLKGKTVVLGVTGSIAAYKIANLASMLVKQHADVNVIMTHNATNFINPITFETLTGNKCLVDTFDRNFEFNVEHVALAKRADIFMVAPASANVIGKMANGIADDMLTTTILAAKCPKLVSPAMNTNMYENRIVQDNIKKLEHYGFEMIKPAEGYLACGDTGAGKMPEPQTLFNYIMRTIACEKDLAGKNVLITAGATQEKIDPVRFITNHSTGKMGRAIAENCMLRGAHVTLVNASVSVEPPMFVDVVNVTSAADMADVVKSKAAEQDIIIMTAAVADFCPSHPADEKIKKNDSSYESVIELERTEDILSYLGAHKAKGQLICGFSMETQNMLENSKAKLAKKNADMIVANNLKVAGAGFGTDTNVVTLITADDCTELEIMDKSCVAARIIDRLLQMMGGVQIICHLLDLRRAVWKLYAAISKSGAENTRSSSTTMNPKKKSKELKRISRENLNGRYRLSMSVFLTVTLINLFSDLPFTYLLGNVYATKVQTVIYYIAEVLLSIVVGVLQMGLIRFHLNMARKKECRISDVFYCFMNHSNRYFGAYIIYYAISMIAKAPFLVARNFFKLSGDTMGIAIALYAASAVLSFIVLVLFTFYLYLVLSRDDLSVFACLTNAIKLIRGNILRVIYINISFIGMLVLCVLSLGIGLLWVEPYYEQTFANLFLDVTGELPAVDCAVMQTDETIDRYFYITGWICIAIFAALAAVIGVCGTQILTKVPPCPLHAYTGYYCPGCGGTRATFALLHGHLIRSFVLHPFVPYTAVFGGWFMLSQTLQRISRGRLHIGMHFRPLYMWLALAIIVVNCIVKNMLILFCGIHLLKMDPQKFDYNQDYNYNFGSNYGPGFNPNNNFYNKRSRNMEVAALVLSIIAIASCSCIYVSIICGSLAMIFALLSKGGATSMSSMAMTSFWIAFAAVVITLIIYIGSFAAMLHEYGSIEGILKEYQNLTGIDYNELLKQMNTAKMDIIAAIAEELQIKKGQAEAAVKLIDEGNTIPFIARYRKEATGSLNDEVLRNLFDRLTYLRNLEDKKQTVLASIEEQGKLTDELKKAILEAQTQVAVDDLYRPYRPKRRTRATIAKEKGLEPLAQTILAQESSVDIMAEAAKYVDAEKDVADEAAALAGAKDIIAENVSDNADYRTKIRELTMQKGRLISTAKDPKAESVYEMYYEFDEALSKVAGHRTLAINRGEKEKILTVKIEAPTEDIIKYLKKQVITNDGAPTAAVLTEVVEDAYDRLIAPAIEREIRNNLTEEAEDGAIKVFGKNLEQLLMQPPIAGQVVLGWDPAFRTGCKISVVDPTGKVLDTTVIYPTAPQNKVEEAKAVIKKLIDKHHVTLISLGNGTASRESEQVIVELLKEIPVNVQYIIVNEAGASVYSASKLATEEFPNFDVGQRSATSMARRLQDPLAELVKIDPKSIGVGQYQHDMNQKKLSEALGGVVEDCVNKVGVDLNTASVSLLEYISGISKTIAKNIVDYREENGKFTSRSQLLKVAKLGPKAFEQCAGFMRISDGKNPLDATGVHPESYDATKAVLEKLGYTMEDVKNRNVVGISKKVSDYKALADEAGVGEITLRDIVKELEKPARDPREDMPKPILRSDVLEMKDLTPGMVLKGTVRNVIDFGCFVDIGVHQDGLVHISEICDRYIKHPLEAVSVGDIVDVQVMSVDLKKQRIQLTMKIGQGTNKAGKSEHGGSGKNNVDNKADRSNRNNGGRNSRNDRNSTGSKNNNNRNKKPHYIKGKKNNFFDNIIFDNMDVTTNNTKSKVNIRLLVGTGMLSGLAFVLQYLEFPIPIMPGFIKFDFSDLPALIGAFAYGPLAGVIVEFIKNLLHCTVTQSFTVGELSNFILGAVFTATAGLIYKKNKSKKGAIIGAVVGSVVMGIVSFPSNLFIVYPAYTKFMPMEAIIGAYSELLPSVGKLWQALLIFNVPFTIVKGLISTLITVLIYKRLSPVLKGRGMKLEFDVKVTEKDLYSFNIEQAYKGSQGVISLLFAVLLAAAAVLSAQKGNTEYVVLYIIVGILVLLYVPFSLKGRVKMIMKTNEVFSKPLHFEIDEKNIKVSQGEEMAQLPWEQVYRFVANDKRILIFSNRKNAYILSKEQLGDSYEPLKELAGSTLEKYRLKIKMSSEGNITVIESFSADDTHALGVTLGQQAKPGDVCTLVGDLGVGKTVLTQGIAEGLGITEPINSPTFTIVQVYEDGRLPFYHFDVYRIGDIEEMDEIGYEDYFYGDGLTMIEWANLIEEILPKKRKEITIEKDLEKGFDYRKITIKEVLMKILALDSSGLVASVAVVSDDNLIGEYTINYKKTHSQTLLPMLDEVAKMTELDLKTIDFIAVSAGPGSFTGLRIGSATAKGLAMALDKQIVSVPTVDALAYNLWGSADVVCPLMDARRQQTYTGLYDFTDGRMNTILPQCVVMIEEIVDKINELGRRVIFLGDGVDVFRDYINEHVKVDYDFAPAMCNKQRASAVACLGQVLYEQGRAENAADHKPEYLRLSQAERERQEKERDFRIMIIRPMEPEDADSVAQIEKDSFTQPWGRQGFLDAMRLPENIMLVAQEDGEILGYQCTYVSFDEGELTNIAVKKSARGKGVGAHLIRCLQEKAKESGVERIVLEARVTNEAAISLYQKMGFVNLGIRKNLYEHPVEDGVIMSYTAEENLCMLDVCLLGTAGMMPLPNRWLTALSLKYNGSNILIDCGEGTQIAMKEAGINFKPIDILCITHFHADHISGLPGLLLTMGNAERTEPLTIIGPKGLTRVVTALRTIAPELPFEIKCIELNEQDEYFEMNGYHIHAFRVKHAVMCYGYSVEIKRSGRFSVERAKEKEIPMRLWNPLQKGNTVEFEGRVYTPDMVLGPARKGIKVTYCTDSRPLEHIVEAAEGSDLFICEGMYAEKEKIVKAKQYKHMTFYEAADMAKRAGVKELWLTHFSPSLVHAEDYMPQVRDIFANAYLGKDAKSVELMFDELAANNPKDTYKQSVTADYKIAADSDTETEMTENTETKKEIKILAIESSCDETAAAVVVNGRDLRSNVISSQIALHTLYGGVVPEIASRKHIEKINQVIEQALSDAHMTLDDIDAIGVTYGPGLVGALLVGVAEAKAIAYARNIPLVGVHHIEGHISANYIENKDLEPPFLALVVSGGHTHLVRVVDYGKYEILGRTRDDAAGEAFDKVARAIGLGYPGGPKIEKVSHEGDPHSIEFPRAKIVGGVYDFSFSGLKSAVLNYLNGCRMKGLEINRADVAASFQQAVTDVLVGHAENAIDEFKMDKFAIAGGVASNGVIRHAMEEMCARKGVKFYRPSPILCTDNAAMIGAAAYYDFIAGKRSGLDLNAVPNLKLGEMDKKKYTAIILSAGTGSRMKSNMPKQYMELLGQPVIYYSIKAFEDSPVDEIVIVCSADYIEYFRHSIIEKYGFKKVKAIVQGGKERYNSVYEGLKAANGTDYVLIHDGARPLVDNEIIVRSMHTVEKEKACVAGMPVKDTIKVSDELGYSENTPDRKSLWQIQTPQCFEYDLLAQSYDKLFSDMSYGKSVPAITDDAMIVEYGSDTKVKLIEGSYENIKVTTPEDMGIAELFLKKRRKMVRSVTSPCASLSVPAEESKGWSATIFYLLHSLIGKPKLILQIKNKPLTVSLLHFQSRPRGSKLHYILGRIYARIYPLDIGCLSCYNMCSGYIASSLKCYHFRTCEGGKPPFNPPFKRADRLIMRWCYHRESEVSMDKKYIENQYRLAVLDFQTARNEDEQWEARKTMARLEQIAAQEYGFEYADELHEKEIGRKGLMKVGKFQIGRYHAIIRKSYADGSVDYETSFSDHADLMESVYCLRLCIGKMVGIATDTPKVLTGVQVIRGKENIVRELEGKQPMAVIKAVSSKAGIGHAIDYVTKKEKTEEKLVSGLHCEPETVKEEMQATKELWGKTDGRTYKHYVQSYHEDEKITPEQAHKNAVELAEHTKAWKGHEVLIATHIDKGHIHTHFIVNSVNYENGHKLQWSKHDLKDLKERCNEQSREQGLHVPEKGKTFAGEVREETVAWSKDTYQLLKQAEQGNVKSYVQDIALAVLDCKETATSRETFIRLMNERGYGVDWQDSHKYITYTDLARGQAGEKACKIRDNKLEKYYNMDFGKESMEHEFERNARTAEAEQSKRAASRVKPTEPDRAGKQSAQRSVGDVERELRGIDEAVKSRTSKGRAEQAERRRAEQEAHQRAEAERRATEEQQRIASRRYIGRGWEFERMKDEVKENTVQEVRKALQANIEAIQRATKLLEKQSDTLTSVMKQKIRELEESKNSFFRYEGLKLYLFWGGMVCNILVFLMLASSMFGRMAKYTKRRDKRRYEWKSAYREKEALMLERGYPEVSPHDFYRELFPAGSLQQEPEDGKGNIIATQIRPSGKGRTRQWVIDDSLKMLDKVIGDRFGLIPPISFYGKSHTKENAHELFAVVVDVDYVGKQQLKNLLKQFGNGVQLRPTYLVSSGKGVHLYYFLQEPVQLYRNREEVLAELKEALIRRLWNDTSSIRPDSPDITGIYQGFRCVGSQSKLGADFPVKAYKLSENRYTLEDIKASIPSCKVDFAPLYEKPRRKSTVTLEEAKELYPDWYEKRIVQGEPKQKSKKQGGTWVCNEALYEWWKRKITEEVKAGGRYFSIMALCSYGLKCGVSEYRIRRDAYAFLEHLESLTEDEDNHFSRADVKDALRALKGDRKRLSTIASREWIEDNTKVTIPANKRNYRKQEAHLYLARRKKEDMKVIGEVVNEGRPTAEQTVREWQESHPAGKKADCIRETGLSKPTVYKWWKMKRKVIVSITFVVLLCSIVLCVINQKKAPFIEGVIVEKNERFFTIETDIQEKIVCTLPKEYDYQDISLGDNIRVYYKGEILETSPARIKNVKEIKKIMKKNKIVNKIGILVLAVMLSILSSITVLASEPEEAELGPRQDISKNLTTGEITVNEIPANLNKNSSDVMEPFIPEGMKVDPTTREVIGPDNRYRITDTTAYPNSAICYMEMKFPDDDGLYVGTAWMYGERVAMTAGHCVYDASLGGWAEWVRIYPGSNGGTSPYGVHYASVLHTDTKYIESENSNYDWGLLEFSSDIGSSTGYFGASWTTSSLVGTGIVVRGYPVEKNAQMWSMSGSIAASGTFKLSYYIDTTGGQSGSPVYKNDGNYRCVGIHTNYNSLGYNQAERIDESLFDIMNQYRMYLYWQKCHKKPFPLVYCQSHKEKSVKGGRKTAEFPLDTLFLLDIMSEGKMAVSPFRYFPLCFIVRSGGRKMTGCGTKIENAYDTYSTDYINGYNGSNYFASNLCVTNDVNFGQDNMQFAKTAEGAGAFNIDTHQVLYSQNLFEKLYPASTTKILTAYIILKNCDLNATVTVSHDAANPGHSSSVCGLKEGDVITVQDLLYGLLLESGNDAAIALAEYCSGSVEEFAKLMNSTAKSFGATNSNFVNPSGLPDENHYTTIYDMYLIFSNAISLESFVAIISSQTHDVAYTNSQGVAVSKTFKNTCGYLTGAYTAPENVTVTGGKTGTTGEAGYCLVLLSQNAKNERIISIVYKADGKKDLYSFMNEILSGFANMNIGLVAHDSKKKLMQNFCIAYRGILSKNNLYATGTTGRLIEEVANLSVHKYLAGHLGGIQQLGAQIEHNDIDLVIFLRDPLKPKPHEPEVNSIFRICDEHNIPLATNLATAELLILSLDRGDLDWREMYKMLKQYRLKNYHFQLVVYIIALSIIGILLIGSAKHSVQSKQIIGFVMGLTIMIVLSLIDYTFLLKFVWIYYAGMIVLLLLVLFAGDDAKGAQRWFEIAGIRFQPSEIAKIILILFFAYFFSRFEDSINTVRTLVLSVIFAGIPLFLILKQPDNSTTILTALIFATLLFISGLSYKIIMPVLGVSVPIVLIVISYIYTHADALIKKGFYPATRIMSWLDPTNYADTAAQQRNSIWAIGSGQLFGKGLNNSVVTSMKNTNYIIEPQTDFIFAVAGEELGFIGTISIIILLLLIVIECILIARKAKDTSGKLICCGMGALIGFQAFINLCVATGLMPNTGMTLPFVSYGLTSLVSLYMGMGIVLNVGLQPKKYSMMHKFSKTGEYAKKRLKIALAEDRSTISASDNMTQIKKEIKSVIQRHMNINDEAYEVRIIMRDKKSINNLMSEAIVFTSGKGGVGKTTVISNIGVELSQLDKKVIMLDTDMGLRNLDLVMGIEDKVNYNILDILKRSCRIRQAIIRNKKYPNLYVIPAAPSMDTLCSYEARFKILIEELKASFDYCLIDSPAGIDSGFWFSVSPADRAIVVTTPHVSAIHDARRCISLLDSAHLDDISVIVNAYDKHMVRRHQMISDNDITALLSTRIIGTIPYDKSVIICQNRGIPVREAKSRLGPVFARISGQIIHSSDDMRGAAVMIYDIKDFLKKFFSSRLFVLAAVIILMFVLLAERVFTLQIIKGADYQKNFIMLIKKPLSIEASRGNIYDVNGELLAYNQLAYSVVISDNGSYSSTKEHNRLLNKELNEIINVIKNNGGSIYNDFPVVLNDDGTYSFTFTSETSKKRFLSDVFGKKYDKLEYNKALGFDEANASAQNIIDFLSSDQNECFDISSKYDTQATYDIVVMRYAIKQNRFTKYKTTTIAKDVNDSIVAYVNEHSDTLTGISIEEDTIRKYNYPEYISSLIGYTGKISTDEYNELSKDDDSYTQNDMVGKSGLEQYYESYLRGKNGEKQVYVNNVGKINEVISQKNPVSGNDVYLSIDIKLQEATYKLLEQEIAGIVYSKIKSGEIPISDVYFALINNNVIDLTHFNASDASATEQAIYNSFSGQLQDALSTIDRELESGTSGTASMSEQTLDYFTCVMSVLNDDGLLLSKQIDTSDSTYASWKAGTLSPRDYLKYCISKQWIDITKLDVDQKYADSSEIYTALCSYIKDAMTDNKDFAKIIYKYMVNSGAVTGQQLCLLLFDQGVLDYDDATVSNIANGSISPYAFLMDKINNIEITPAQLALDPCTGSCVITDVKTGQLKALVSYPGYDNNKLANTVDADYYQSLREDKSNPLWNYATQEQTAPGSTFKMVSSTAGLAEGVIDTSSKINCTGIFTEISNQPKCWIYPGAHGMDNVSEALRDSCNVFFYTTGFRLASKDTGSYDDENGMKYIQKYASIYGLDQKSGVEIVEKTPSIATQYPVMAAIGQSNNNFTTISLSRYVTAVASGKLYDYKLMNKIVDADGKTVKQYDSKSTDISGTLTQSQWDAIHQGMRMVVEDLHDVFGGFTGVEVSGKTGTAQQVETRPNHALFVGYAPSSNPEITIATRISYGYSSHNAAAASRNIISYYYNLESLDNLLAVKAEGVNSSGSSARTDMRRRIVLFIIITLCFVLQTTLFKTLSFANISPNLLIIAVSSFGFMRGKKEGLWVGFFCGLLIDIFCGNYIGLYALIYMYIGFINGLFQKRFYPDDIKLPMLLIGGSDLFYNLVVYFFMFLLRGRFSFLYYLKSIIIPEFVYTMVISILLYLVFLKVNQKLEAYEKRRAKKFDLMSKNFRNRKRKHNKKLPARYTLLIMTAVCFVTMLLSLTLNISGGPLKTVAGYVFIPMQKGINSFGIHISDKVTEIRTLKNVKAENKKLKAEVEELTTQLTTNKLEQYELDNYRQLLDLDAKYPSYPKVAASVIAKDSGNWFSTFTIDKGKKDGVDVGMNVLAGSGLVGIVTDAGDNFAKVRCIIDDASKVSGMVSTTEDNLTVSGNIKTMNDDKVITFTELKDDDNKVKEGDPVVTSYVSDRYQQGILIGYVTKIENNSNNLTKSGTITPVVDFEHIENVMVITQLKQTGDTKTADNTESAETAGDSQTENSTENKMSNNVYGIDLGTNNFKVYSKATGKTMLEKNTIAVIDKNQIYAYGDRAYAMYEKAPETINVIFPVVEGVIADYNLLQTMIFDFLEHKTKARIKNAEFIIAVPTDITDVEKRAFYELFYKSKSKPKKVMLCEKPIADAVGLGIDVNEPTGVMIVDMGADTTETSVISLGGLVLSDLLHFGGNRLDESIISFVRKEFNLVIGQKTAKLLKETIGSALPGREDSMVVVGRDVVSGLPIEMEIGSKIVYEAMKSNLESICTSIKMILEKTPPELAKDIIHSGIYITGGGSQLAGLDQLFEQITGIKVICSECPEESAVRGLVQIVSDSKYKRLPFSIKKMHNNKTIKNLPASERPYEKFLSLGASGLSDADLLAIIIKTGTRDKTVIDIAQDILSGRHGNLLNLYEMSYEELLSIPGIGQIKAIQLKAIAELSLRIAKTKKVQSIRMNNPQTIADYYMEQMRHLTNEVVICAYFDVKSRFLGDKFISKGSLSSSVVDVGSIIRTALDKNASKLVLLHNHPSGDCTPSRNDIAVTDRLIEGSEIFSIELCDHIIIGDNEYYSFYENKLIMLDTNEAIYRQYETLGISKEVLDFGTSVEKELKERFDKIDTNAEYNQLKVIAAMQKNKVSAECFQASSGYGYNDLGRDTLERVYADCFGAEDALVRPQITCGTHALALALMSNLRPGDELLSPVGKPYDTLEEVIGIRPSKGSLAEYGITYAQVDLLPDGEFDYDGIKKAINEKTKLVTIQRSKGYATRPTLSVKRIGELIAFVKSIKPDVICMVDNCYGEFVEDTEPIQVGADMMVGSLIKNPGGGLAPIGGYIVGKKECVENAAYRLTSPGLGKEVGASLGVIQSFYQGFFLAPTVVSGALKGAIFAAKIYEKLGFKVVPDGTESRHDIIQAVEFNNRDAMIAFCEGIQAAAPVDSYVTPEPWAMPGYDSDVIMAAGAFVQGSSIELSADGPVKPPYAVYFQGGLTWYHAKLGILMSLQKLYERNLVKLDMTTYTFGLRCNMTQKPMIVLTGPTAVGKTALSIELAKKINGAIISADSMQVYKYMDIGSAKVTVDEMDGIKHYLIDELEPSDEFNVFIFKDMAKKALNEIYEAGKIPIVVGGTGFYIQALLYDIDFTKQDVDEAYRKSLYDFANEHGNHALHEKLKDIDPASYESIHENNVKRVIRAIEYYHTCHEPISKHNETERAKQSPYSFAYFVLDDVRQRLYERIDKRVDIMVSNGLVDEVKKLKAMGCTSDMVSMKGIGYKEILAYLDGEYSLDEAVDKVKLESRRFAKRQLTWFRREKDTIWIEKNEYSYDNNKILNKIQEILAEKRIIICMPNIAILNQETIDKIAAGEVVERPCSVVKELVENAIDAGSTAITVEIKEGGISFIRITDNGCGIERDQVAVAFYRHSTSKIRSAEDLLTVKSLGFRGEALSSISAVARVELITKTYDELTGTRYVIEGSKELSNEEIGAPDGTTFIVKDLFYNVPARRKFLKTAQTEGSYISDMVEKLALSHPDISFKFINNNQTKLHTSGNGNRKDIIYHIFGREISSSLLEVKHECEYFKVEGFIGKPVITRGNRNYENYFINGRYVKSNILSRAIEEAYKSFLMQHQYPFTVLYFTFFSELDVNVHPTKMELRFDNNNEIYVELCDTIYAILSRKEMIPEVPVDSTPAPKKIVHEYKEPIPEPFEKRRINEVRAAESRSVYGQSVTATVKSSTVKGPAVNEPLTENTLNQQKTKTSASTPVGHTGNSVEPKPETSTAYKPAQVVTGTQQTLGDYDKVFLTESAKKQFSIIGQLFKTYWLIEFEDKLYIIDQHAAHEKVLYEKTMARLANKDFTSQRISPPIVMTLDARECEMLEKYRPQIEQFGYEVEHFGGKEYMISAIPDNLFNIDMKDLFIEMLDDFSNATGRQTPDIITEKVASMSCKAAVKGNDKLTLPEINKLIDELLSLDNPYNCPHGRPTIISMSKYEIEKKFKRIVMAEVSPMMQHYLQTKEQYKDCILFYRLGDFYEMFFDDAIMVSKELELTLTGKNCGLEERAPMCGVPFHAADSYINRLVSNGHKVAICEQMEDPKQAKGIVKREVIRVVTPGTNTDMASLDEAKNNYIMSIVYTEDKYGIATCDVTTGDFFTTEVDAERKLLDEVSRFNPSEIICNEAFYMSGIDVDDMKNRLSITVSALDSWYFSDGLANETLLSHFHVQTINALGLEDYESGVIAAGALLKYLYETQMNSLDNILELHPYSIGKYMIIDSSSRRNLELVDTLREKQKRGSLLWVLDKTRTAMGARLLRTYVEQPLIEKAEIIKRQKLIEALNANEITRDEIREYLNPIYDLERLITRITYQSANPRDLIAFRDSLKMLPPIKQQLSDIPCALTDEINEEFDELKDIYELLLSSIEDEPPISQRDGDIIKAGYNEEVDRLRDAKTKGKTWLAELEAGEREKTGIKNLRIKYNKVFGYYLEVTNSFKDLVPDYYVRKQTLTNAERYITPELKELEDTILGAEDRLTSLEYELFRDVRKQISDNVSRIQKTARAIAQIDVFASLALVASQNNYCKPKINESGIIDIKNGRHPVVEKMITNDMFIENDTYLDQHKNRISIITGPNMAGKSTYMRQTALIVLMAQIGSFVPAQTANIGIVDRIFTRVGASDDLASGQSTFMVEMNEVANILRTATSKSLLILDEIGRGTSTFDGLSIAWAVVEHISNPKLLGAKTLFATHYHELTELEGKLDSVNNYCIAVKEKGDDIVFLRKIVKGGADRSYGIQVAKLAGLPDSVIERAKEIAEQLLANDITDTVKSISVDNGHKHKKEHLDEVDMTQISLFDTVKDDDIIDELRSIDIGNMTPLDALNKLYQLQNKVKNRWMIKINQIKLPVTHSDEALKKKIIKMLKLNAKTGFTYRILKKSLDARKKPELFYTYSVAVEIEDTKNSEESIVKRAASSSVLIYKEKEYMIPACGHIPLDRRPVIAGAGPAGLFCAYILAEAGFRPIVIERGSRVEKRTCDVQKFWESGILNPKSNVQFGEGGAGTFSDGKLNTSVKDPSGRNRLVLETFVRFGADPSILYDNKPHIGTDVLSEVIVNMRELLVDKGTTFIFDTCVNNLDIVSQKLLSVYTNSDSNSNSEIKTDVCVLALGHSARDTFDMLYNKGFDMECKSFAVGFRVEHPQRMIDESQYGIQKKIILPPSPYKVTSNFPNGRGVYSFCMCPGGYVVNSSSTENHTVVNGMSYHDRNSKNANSAIIVSVSPKDFGADDALAGVRFQEKLETENYKRGNGLIPQQLFGDFCDDRLTTAYGDFGSCTKGNTVFAKLNGLMNADMEQSFKLGMEHFGHLIHGFDRKDAILSGMETRTSSPLRIKRDESFESNISGVYPCGEGAGYAGGITSAAIDGIKVAEAIIKKYRPDFKMYDVIIIGAGASGLMAAATAASKGARVALLEHKDDIGKKILATGNGRCNFTNTDMSVNKFHGSKALIKNGLSQFNYADTIRFFKELGIPAYDNAGYIYPNSRQAASVVAAFRMELMRLHVDVKTGISITEIKTTGIMAKDTKSAANPATNKKTDDRTGYCIQTDKGSFKSKRLIIACGLTASPKLGSDGSLFRQLEALGHHIQKPLPALCGFSCDGLNFKKITGVRCDATVASVIDGQMTEQNTGELQLADYGISGIPVFQISSLMSRAIDKGQRVEVIIDFLPAFSDDKLNGYIKDRSITTTDNRSLNEMLNGLLNNKLLLELIHKSGVSPDKKGRLLTDDDCKSLTRSIKHTAVSVKKPRGSEFAQVCAGGIYTKEIDVRTLESKIHPGLYFCGELLDVDGICGGYNLQWAWTSGYIAGEMQMKSKISICFLTIVVILLALVMIEKINTQRAADKAAIIAQSNENDKEEKNEKESLLTSNEAKNAKYRIKNDSGMLSVYNATASEKYFDTGVYFEELPDEAKNKVTNGLYFFNETDLYDFLESYSSMSKKNNGASNALVQGSILAVASIISRIIGLIYRIPMQRILGDIGIGYYSTAFEIYNVMLIISSYSLPLAVSKMVSAQMAKKRRTATYQILKCALLFATISGTTVALILFFGGNFFATTLLNTPYSIFALRVLAPGLLVVAVLGVIRGFFQGLGTMMPSAVSQIIEQIVNAIVSVWAAYVLYRTGTRIGAVLGDKEHYAAAYGAAGGTLGTVLGSVAALLFVVFIFAIYMKVFKRKMKRERNVRVNSFGYTMKILVITVIPVLLSTTIYNISGIIDQGIFKQVALLQGYTQNDIDVWWGVYTGKYKLLINVPISIASAMAASFVPVLTGAYHRDDMEAVRGQINLSTRFIMVVAFPCAVGLAVFGLPIFNILFSSTRVTNAEASLMMYVGAVAVVFYSLSTLSNGLLQGIDRLKVPVINAAISIVAHVIVLILLMLIFRLNIHAVVLANTFFALLMCFMNSMALKKYSGFKQEIKKTFIIPAISSLIMGVISYIVYFILYKACHIEIIAFILAAIIAVISYAVALLLLKGLTEDELRHFPKGTLIIKVVKKCHLLMSFFIEKEVECNFNFDYEKVAEAVVSASLEHESFPYEAEVNLTLTDNEGIHAINKEYRQIDRPTDVLSFPMLSYETPGDFSFLSDENEDDFNPDTGEVMLGDIIISVDKVKEQAIEYGHSEKREFAFLITHSMLHLFGYDHMEADEAAVMEEHQRKILDALGITRMSLNEVSIKIPGEYIPNVFGQFDAFAKKIERTLHVTLVLRDDSLKIIGAQGNIDGAKEVFEQLIALAERGNVITEQNVNYALALLEEHKGSEIVEIDKDIICHTINGKPVKPKTIGQKEYVDAIRKKMIVFGMGPAGTGKTYLAMAMAITAFKNEQVGRIILTRPAIEAGEKLGFLPGDLQSKIDPYLRPLYDALYQIMGAESFQRNMEKGLIEVAPLAYMRGRTLDNAFIILDEAQNTTPAQMKMFLTRIGFGSKVVVTGDATQKDLAPGAKSGLDVALRVLKNIDDIGICNLTSKDVVRHPLVQKIVQAYDDYENKQTAKTARKQRKSNKMSIKAYATVRLTGCNIRRFINLCTANHIKIWNLKYVSPKEYEACCSTEDIFLMKPHLKKTHTRLLVVKRQGYFAIRAFLYKIRIITAAIIGVFCIHALICTRIWHIVPEGNRFTYDESVISFMESENVTIGSHKRADYSLLEKKLEEKYPDITWCSIYIEKNTMKIDISEGINYRMKMQKVTDSFELPKDIVLGLPIVTAYGYNELTIENHKGILSFSDKAVTVRAADSTIKISGSRLEIKEFTKDLIIIAGHLKGVIYEYMKITILCVGKVKEKFYRDAIAEYSKRLSRYCKLEIIEVSDEKTSEQATQTEIDIVKNKEGERLLKNIKDDAYVFCLAIDGKQLDSVELSQKMDKLMTGGKSHLVFVIGGSLGLSNDILKCADYKLSFSKMTFPHQLMRVILLEQIYRSFRISNNEPYHKMKIYVDEQKRYEDTKATGQCFTAVGAIGLIAIVLLDTGVIKLAALDSVNKLMVSIVMGLVFLIFFIIGMKSFMELKDISKKIDLNNSLEKEIMEYVTVTHKDELMTLASSGEKGDACSGDLYYKRAELITSVITEKYSLLEESFLDHMVEEIYSKIYSDIVEEMKELQDRILKDGQVIGTNILKVNKFINHQVDPVLMEHIGEDFANHFAGKGITKVVTIESSGIAPALMAAAKMNVPLVILKKQPSKTLHTDLYQTQVTSFTTEKSYELTLSRDVISEDDNILLIDDFMADGEAATGAIRLLRMAHATVAGIGILIEKSFQPGRRKINEQGYEVYSLARIKYMDEYQIDFIEENMTKTFKEVFPTLKLDKDMENLLENADVTRISVNHARDFYKIYVKAKRLIFKKNIWKLEESIKKQIFKSKDITVKIIESYELSSQYTPKTLFDVYFDSILDEINSHSVLLYNLLRTSKWSFTDDTHVTVTLEETIIAKTRGNSVIEFLEKVFCERCGMDFIVNLQYEKPKISKYRQNADKQIEQEVQNIVARTKFAMAKDDGDEDAKVAVDDGAMFVGGSENAFSTINDSKTEATKVSNRKKEAKTDSDSNSRSNSAGTDKKPEKKFEKKFEKKFERKGDFRRKYDNDPDIVYGRSFDDEEMSIEKIDGPIGEVTIKGKILTVESREIRNEKTIIMFAVTDFTDTIMLKLFARNDDVADILAYIAPGNFVKAKGVVTVDKYDSDLSISSIVGLKKIPDFTSKREDTAAEKRVELHCHTKMSDMDGVSDVKDIVKCAMRWGHKAIAITDHGDVQAFPDANHTVDDKFKVIYGVEAYLVDDTKDIVENAAGQSLDDKYVVFDIETTGFSPEKNKIIEIGAVKVIGGEIVDRYSTFINPEVPIPFRIEELTSIRDDMVITSPTVDVILPQFMEFCKDCIMVAHNADFDMSFIKRNCALLGMECNPTIVDTVALARVLLPQLNRFKLDTVAKALNISLDHHHRAVDDAACTAEIFVKFIEKLKDRGISGLDEVNALAKSSVEMIRKMPTYHAIILATCDQGRTNLYRLISLSHIKYYNKRPRIPKSEFNKYRDGLLIGSACEAGELYRAILNGRPQEEITRLVNFYDYLEIQPLGNNAFMIRDEDSDIASNDDLIDINKRIVKLGEEFGKLVVATCDVHFLNPEDEVYRRIIMAGKGFKDADEQAPLYLRTTEEMLKEFEYLGSKKAEEVVITNTNKIADMCERISPVRPDKCPPVIENSDGMLREICYNKANRMYGDPLPPIVKERLDRELNSIISNGYAVMYIIAQKLVWKSNEDGYLVGSRGSVGSSFVATMSGITEVNPLHAHYLCTHCKYSDFDSPEVQAFSGRGGCDMPDKLCPKCGRPLSKEGFDIPFETFLGFKGNKEPDIDLNFSGEYQSKAHKYTEVIFGEGQTFKAGTIGTLADKTAFGYIKNYYEERGIRKRNCEIDRIVQGCVGVRRTTGQHPGGIVVLPMGEEINTFTPVQHPANDMTVDITTTHFDYHSIDHNLLKLDILGHDDPTMIRMLQDLTGVDPTKIPLDDKAVMSLFQNTSALGIEPEDIDGCPLGALGIPEFGTDFAMGMLLDTKPKEFSDLIRIAGLSHGTDVWLGNAQTLIEEGTATISTCICTRDDIMTYLISMGLESEEAFNIMEKVRKGIIAKGKCPQWPQWKEDMKAHGVPDWYIWSCEKIKYMFPKAHAAAYVMMAWRIAYCKVFYPLAYYAAYFSIRATGFSYELMCQGKDRLENYMKDYKKRKDTLSNKEQDVFKDMRIVQEMYARGFDFMPLDIYRAHPNRFQIIDGKLMPAINSIDGLGDNAAIYISEAAKDGPFLSKDDFRERTHVSRTAVDLMSDLGLLGSLPESNQLSLFDFGAMETKIVKIGNKVIGGGNPILIQSMTNTKTENVADTVAQINALTDLGCDIIRCAVPTMEAARALKEIKKQISIPLVADIHFDYKLAIAAIENGADKIRINPGNIGSAERVKAVVDVAKERNIPIRVGVNSGSLEKDLVEKYHGVTAEGLVESALDKVKLIEDMGYDNLVISIKSSDVMMCVKAHELISDKTNHPLHVGITEAGTIISGNIKSAIGLGLILNQGIGDTIRVSLTGSPLEEIKSAKLILRTLGLRKGGIEVVSCPTCGRTQIDLIGLANQVETMVSGYDLDIKVAVMGCVVNGPGEAKEADLGVAGGIGEGLIIKHGEVFKKVPESELLGALKYELDHWGEMNIISIIIAIILFSIIVIFHELGHFWLAKANGIKVNEFCLGLGPTLFGVQRGETKYSIKLLPFGGACIMEGEDESSGDDRAFNNKSVWARISVVFAGPFFNFIMAFIFALIIICSVGYDSPKLAGVIEGYAAEEAGIKAGDEIVKLNNTNIHFYREISLYSMLHEGETVDVTYLRDGKKHTTTLKPKYDETTKRYLYGFNVSGERTKPGFGKALLYSCYEVKYNIYTTIEGLKMLCTGAASVNNLSGPVGIVKNMGDTYEQAVSMSGVWLGILNMLNWGVLISANLGVMNLLPLPALDGGRLVFLIVEAIRRKRVDPEKEGYVHLVGIVLLLLLMVVVMFNDIRNLIVMKKISILGSTGSIGTQTLDVIREHGDMQVVALSCGRNLSLIEKQAREFKPQFVSVSDENDAKKLRTSLADTDIEVGYGMDGLIRCATIEPCDIVVTAIVGMLGIRPTIAAIKAKKTIALANKETLVTAGHIIIPLAKEYGVSILPVDSEHSAIFQSLQGNSMNPIKKILLTASGGPFRGRKLSELEGIRVEDALKHPNWSMGQKITIDSSTMVNKGLEVIEAKWLFDVDLSQIQVVVHPQSVIHSAVEYADGAVIAQLGTPDMRIPIQYALYYPSRPALSGDRLDLFKLKDLTFEAPDLDTFKGLALAMKAARAGGNIPTAFNAANERAVALFLNKKIKYLEIIDIIEACMENASFIENPSVDEILDTEQCAYDYISKRWMFKTRLLSGIVLVIAAIFLIVTGNEVLLFSTLLISCIGMFELFRVFKFEKSLLSVVPYIALILFYINLRWSFIPDVMMLFMGFLIVLMFVYVLSYPKYDAKQLMAAFFGMFYVGTMLSYVYQIRTLNNGLYLAFLVFLCSWGCDTCAYCVGVLIGKHKMAPKLSPKKSIEGAVGGVLGSALLTALYCFIFRNHMNIDGTEIAILAVIAAVAGLISMVGDLCASAIKRNYDIKDYGHLIPGHGGILDRFDSMIITAPIIYYLASFFLSMSTPEHIAIILDGNGRWAKSKGMPRNYGHTVGAKNVENICKAANDLGVKYLTLYAFSTENWNRPESEVAALMKLLESYLKNCIKTANKNNMRVRVIGEISRLSENFQEKIRNLEEVSSVNTGLNLTIAINYGSRDEMIRAVKHMIADHDDGKLSADDIDADTFSSYLDTRELPDPDLLIRTSGEQRLSNYLLWQLAYAEFYFTDVPWPAFDKNELKKAIDAYNKRDRRFGGLKETNDTEDKMDSRLNPFQDKMEKTLNNLEEEYAGIRAGRANPHILDKLRVDYYGTPSPIQSVANVSVPEPRMIQIQPWEASMVKEIEKAINCSDIGINPTNDGKLIRLVFPELTEERRKDLAKDIKKKGEEAKVAVRNIRRDAIDSIKKTGKEEGISEDEIKGLEDDAQKLTDKFVAKVDAAVDAKCKEILTVMSRILLKLSGEALAGDKHHGFDEATVIEVAKQVKQIVDKGTQVGIVIGGGNFWRGRTSETIDRTKADQIGMLATVMNCIYVSEIFRYVGMKTAVLTPFECGNMTKLFSKDRANKYFAHDMVVFFAGGTGHPYFSTDTATVLRAIEIEADGIYLAKAIDGVYDSDPKTNPAAKKYDELSIEEVVEKKLAVVDLTASIMCLENKMPMYVFGLNEENSIVNALTGKFNGTKVTVMDSKDNELARQQTITFYQGMYRTISMFMDFMAITAGMVKELREMTGAGMMDCKKALTETNGDMDAAVEVLRKSGAAKMEKKQSRIAAEGIARVAVNGNVAVVAEVNSETDFVAKNETFQEFVQTVADTALASGLNGGANGEDIDALLATNGLSELLVEKTATIGEKLSVRRFAKVTGDVVTSYIHGGGRIGVIIAANGAADDAAKEAITNIAMQVAAMNPQYISRNDISDEELAKLREITVDSALNDATTLPKPILNKLIDKAINEKLWSDDDINNFNEHKNNMNYVWNFLSDAAKAKLGELAMADKESIMAEKMFNGLVEGRVSKQLKEICLLDQTYVKAEDGKQSVAKYLESVSKDLTITEMVRFEVGEGMEKKQEDFAAEVAAQMAGVMSVISMKQLLEAGVHFGHQTRRWNPKMAPYIYTERNGIYIIDLQKSVGKVDEAYDAVSDIAAQGGTILFVGTKKQAQDAIKTEAERCGMYYVNERWLGGMLTNFRTIESRIARLKAIETMSEDGTFDVLPKKEVIALKKEWEKLEKNLGGIKDMKRIPDAIFVVDPKKERICIKEAQALGITLIGIADTNCDPDELDYVIPGNDDAIRAVKLIVSKMADAVIEAKQGAEEEVTAEEASDEIVEEMGVQLLDKTRKINKLLHNNNSSKVVFNDICQVLTGVLDSDILVISKKGKVLGSSICKGVDELHELIVDEVGGYIDTELNERLLGILSTKENVNLETLGFGEDTRMYKAIITPIDIAGERLGTLFEYRSDREYDIDDIILTEYGTTVVGLEMMRSVNEENEEEKRKVSIVRSAINTLSYSELEAILHIFDELDGNEGILVASRIADRVGITRSVIVNALRKFESAGVIESRSSGMKGTYIKVVNDVVFDELDRIRNKNKMAKYLVIVESPAKVKTIKKFLGKNYEVMASNGHVRDLPKSSLGIDVDGDFEPKYITIRGKGEILAKLRKEAKKADKIYLATDPDREGEAISWHLLHALKLEGKDVSRISFNEITKNAVKESLKHPRKIDMDLVDAQQARRVLDRIVGYKISPLLWAKVKRGLSAGRVQSVALRIICDREDEINAFIPEEYWSLDATVDVEGEKKPITAKLYGRGDDKIAISSKEEMDNVLSEIKGKECKVQSIKKGQRSNKAPLPFTTSTLQQEASKALNFPISKTMRIAQQLYEGVDIKGQGTVGIITYLRTDSVRVSDEAEAMAKDFISKSYGDKYLSTGEGTKKSSKNIQDAHEAIRPTDINRVPSEIKESLSRDQFRLYQLIWKRFTASRMAKSEYETTTVKLSVGDYVFSFATSRLLFDGFELAYTAADDAKKEKQPVLKNPLTEESLLTVEELLPKQHFTQPPAHYTEASLVKTLEELGIGRPSTYSPTISTILARRYITKESKNLYVTEIGEVVNSIMKESFPTIVDEHFTANMESLLDAVAEGKVNWKTVVENFYPDLKEAIDKAENELEKVTIHDEVTDEICPECGRNLVIKYGPHGKFLACPGFPDCRFTMPYLEKIGVNCPKCGKDVVLKKTRKGRKYYGCIDNPECDFMSWGRPVAEKCPRCGGYMIVKGNKIACADEQCGYVTDKKPEREEMKFKYWLTSLTDISNAKKKLLHDCSITAEKLFFMPKDELFDILFFTDDDRKIILESRASYDVEKEWILFQQKDIDFVTMEDEAYPDKLRNIHNPPYSLFYIGALPDKSRKSVAIVGARGRSAYGCEVAKVLAAALSRQGIQIISGMARGIDRDAHMGCLEAGGNTYAVLGSGADTCYPKENRFLYDKIKVFGGIISELMPGTDPQKMFFPMRNRIISGLSDIVVIVEAKKRSGSLITADFAMEQGKDVYVIPGRITDTLSYGCNSLIKQGAGIIYNIDEFVSDITMTGFTECTQMDFRKNLLDKKEALVYSLLDFCPIAIGTLSQKVPYELSELFEVLENLIQKGFVKETIPNYYIRSLMYSTVRTAVLDGISAIPVQVEVDISTGMPVFDMVGNLTSEVREAKERVKTALHSVGIVLPAKRITVNLSPANIKKTGTGFDLPIAVAVLTAMGVIDADSIKDCTLAGELNLNGEILPVSGILPIVFDEYNKGIGKFIIPKQNENEGRLVCGAKIFGISHLNDVIAQFDEAAFTCQKTGMAHELQMDEKYADFCDVNGQKFIKRACEVAAGGMHNILLVGPPGAGKTMIAERMPSILPPLSENERLELSKIYSICGLLDNDSSLRDSRPFRNPHYSVTQAALIGGGTRINPGEISLAHNGVLFLDELAEFKGGLLDLLRAPLEEHCIRLSRAGRNVTYPANFLLFGAMNPCSCGYYPDMQRCRCSEPTLRRYFDKVSQPIIDRIDICVEASPLSFEDINSTTSNESSADIRKRVMHCHELQKERFKGESFSYNSKISTDKLEKYCFLGSREKSYMENMFDKLGLTARTYHKILKVARTIADLDGCENIKTKHLNEAICYRSINEKFWGGAVSMTGCYVNTFLSPLSLERETECLKKVAQNDKEAKDELILHNMRLVAHVTKKYAVSEDEMEELISIGTIGLIKAVSSFKADYGNRFATFAIRCIENEILMHFRSRKKSRGDVSIFEPIGTDKEGNQIHLVDVIENGQSDVVSDIEVSESLKILRKNMRSVLSDREYYIITKRFGLDGEKELTQRQIAKTLSISRSYVSRIEKAGLKKLRKLLEMFKSVFCDIIFAMNRKIDYKINENDTGKTVEGFLKEHGYTHQVLVRLKQTDHGILRNGIWAYTNERLCKDDLITVQIVENECSDNIEPVNLPLDIAYEDDDIIVINKPFDMPAHPSAGNHDNTLANALMYYYGSQNKPFVYRCINRLDRDTTGLTIVAKHALAGGILGNAVAKRAIHRTYYAVCSGCTPICMRISAPIARKDASTIERCVDFKRGEYAVTDFIRIKYNPDNNLSLVKLRLLTGRTHQIRVHMKYIGFPLIGDFLYNPDYTYISRQALHSGRLVFTHPVTGQKMNLISDIPSDMKSLFMKAIRHFITITHHKILVMQGCFRIGLYKQGLLHDMSKYSPTEFLVGCRYYKGDMSPNNAERADRGYSSAWLHHKGRNKHHLEYWIDYAVSKPGDDKAHTKMEGMKMPIRYVCEMFIDRVSASKNYQKEKYTDKSALEYYEKSVDHYMIHPDTKAMLEYLLVMLSVKGEEYTYSYIKKEVLKGHIPYEKDKINQLEQGLHVMNFRLTKGNFLKTGAYIEGDSAIFTFAAEKEDECSIVLLDKSGNTACVIDIPAEYSTGSLYSVRLHGFCRNEYAYYFRINGKRCIDPYATRIFGREKWNDKTRSDNDYEIACGIDSSDFDWKYDSFPEITRDRMKLYKLHVRGFSMDVSGDKKHKGTFEAVSDRINYIKKLGFTSILLMPVYEFEEMTIPVKHDIPEYAKPKYSLKDEQSVNTDRQNDKVNFWGYTYGNYFAVKASYASDASDASNELRRLVERLHKNGMECIVEMYFPDRTDHNLILDALRYWVMSFHVDGFKLLGDKLPVTAIVQDALLSRTKILYDGFDMSVVPQNRTYENLYIDKEEYQFAARMMLNHINCNMYELLNQQKKQGENVGFINYISSNNGFTLSDLFMYNDRHNEANGEKNADGPSWNFSNNYGCEGPSRKRFIREIRKLKWKDAMLLLFLAQGVPMIMAGDEICNSQDGNNNAYCQDNPTGWVNWSNEQSRRENIRFLTRLIKFRDEHPVISCPKPFKFSDYKAVGYPDLSYHCKNAWIGECDATKLCVGVMYCGDYNEVNKDYVYVAYNFYSSREKLALPKLKKGMKWYKVCDSTLKEPFYDTPVLCENQQYADVSPQSVYILIGRMAEKATPVTPDEADDIRVTLDLDNGSVECKIITIFDADHKDYIALLPLDKNGNENESGEVYLYRYFEDEEGLPRIENIESDDEYEAAADRFDELLDDEMFDDIMNVSFGTFHAVFFTILKYAYRFTSANIADESVRYGFIREILSYYRLEYKDENEFIGNLLAEISLIKNSRIDIENFYSGVCGEEIFRDIYKKYETRLKENRLIDFDDMLSYTYELFKERPDILALWQNKYKYILIDEFQDINRLQYEIIKMLAAPQNNLFIVGDDDQSIYRFRGSKPEIMLGFEKDYPDAKRILLDTNYRCGRYIVEASLNLISHNRERFDKKIIAASKSKAPVTFADFENRRDENIFLIRDIDKKIKAGAVFSDFAVLFRTNTQPRQLIEQLMSYNIPFKTKDNIPNIYEHWIARDLFTYQRIAGGSRDRADFLQIMNRPKRYLSRDSLCDATVAFDEWIKLFDEKPWIAERIEKLEYDMKLISRMNPYASINYIRRGIGYDDFLAEYAEYRNINKEDLFDILDEIQSGAKGFATYEEWYEHIKEYTKQMKLMALSKESDPNAVTLATLHSSKGLEFENVYIIDANEGIMPYKKAVLEKDIEEERRLFYVGMTRAKTSLSVYSVKSVNDKSAQASRFVRESKEPRQNNSRDDMEKHITTPITQKITKDLKSGDYVYITGEMYVARDAAHKRMIEALDRKEELPIDIKDSTIYYMGPSPARDGRPIGSAGPTTATRMDKYAPRLLDLGEKAMIGKGKRSKEVIDAVIRNKAVYFAAVGGAGALLSKCIKSSEVICYDDLGAEAIRKIYVEDFPVIVVIDSEGNNLYETSIKEFKKIMIREINVSEITAAVKEMCIQANHFLSPDMDKALKAATANEESPLGKKILNQLQENLKIAGEDMIPICQDTGMAVFFIEIGQDVHFTGGVLEDAINEGVRQGYTDGYLRKSVVKDPLIRENTKDNTPAVIHYSIVSGDKVKITFAPKGFGSENMSRVFMLKPADGIEGVKNAILTAVSDAGPNACPPMVVGVGVGGTFEKCAIMAKKALTREAGIHSDIEYVAELEKEMLEKINNLGIGPGGLGGSTTALAVNINTYPTHIAGLPVAVNICCHVNRHVVKELMDDKIFDQIQQVDLKKTMESSYIDYAMSVIASRALPDVRDGLKPVQRRVLYSMVELGNTPDKPHRKCARIVGDTMGKYHPHGDSSIYGALVNMAQDWSMRYTLVDGHGNFGSVDGDGAAAMRYTEARLSKISLELIKDIGKNTVDFEPNFDETEKEPTVLPSRYPNLLVNGTTGIAVGMATNIPPHNLREVVNAVVRLIDNDIEDKETTIDELIDVVKGPDFPTGGIILGTSGIKEAYRTGRGKIRVRAVTNIEPMENGKNRIVVTELPYNVNKARLIEKIAELHKDKKIDGITDLRDETSREGMRIVVELRRDVNPSVVLNLLFKHTQLQDTFGVINLALVNGEPKVLNLYDLLNYYLIHQKDVVTRRTKFDLDKAEARAHIVEGLIIAQDNIDEVISIIRSSQTTQQAKTRLMERFGLTDEQSQAIVDMRLRALTGLEREKLEAEYKELMAQIAQLKAILADEKKLLGVIREEIIAIADKYGDDRKTEIGYDEYDMSMEDLIPETNTVITMTKVGYIKRMSTDNFKAQHRGGKGIKGMETIEDDYIVEMLMTTSHHYLMFFTNTGRVYRIKAYEIPEASRTSRGTAIINLIPLQPDEKITAMIPIKEYEDDKYLFMATRNGIVKKTPIKDYENIRKNGLAAINLREDDKLIEVKVTDNSEDILLFTKFGQCIRFKETDVRSTGRTTMGVIGMNLAPNDVIIAMQTASMGEAVLLVSSNGLGKRTRIDEFTTQNRGGKGVKCYKITEKSGNLVGVKSVENDDELMLITTEGIIIRIQVSDVTVLGRITTGVKLINLKEGVSVASIAKVVEDKTLMPPEEAKEENDESENSDEDSAENNNSHAEAIENNTEAMSKEIQQNNQEYGADQIQILEGLEAVRKRPGMYIGSTSSRGLHHLVYEIVDNAVDEALAGYCKNIEVTIEEDNSITVQDDGRGIPVGTNHKAKKSALEVVFTVLHAGGKFGGGGYKVSGGLHGVGASVVNALSTWLTVEVYKDGNIYRQSYKRGKTDDTVKIVGQCDESLHGTKVHFLPDPEIFEETVYDYDTLKQRLRETAFLTKGLKITLKDVRENSHHNHVFHYEGGIKEFVEYLNRGKEALYDEVIYCEGTQNGVYVEVALQHNDSFNDSTFSFVNNVITPEGGTHLAGFRNALTKTFNAYAREKKILKDSDPALTGDDIREGLTAIISIKIEEPQFEGQTKQKLGNSEARGAVDAVVSEKLTYFLEQNPDVAKNICEKSLLAQRAREAARKARDLTRRKTSLDGGTLPGKLADCSDKDPKNCEIFIVEGDSAGGSAKTARSRATQAILPLRGKILNVEKARLDRIYDNAEIRAMITAFGTGIHEDFDITKLRYDKIIIMTDADVDGAHIATLMLTFLYRFMPDLIKEGHVYLATPPLYKVEKNKGVWYAYDDDELKQILNDIGRDNNNKIQRYKGLGEMDADQLWETTMDPDHRILKQVMIDGENSSELDVTFTTLMGDKVEPRKEFIEANAKYVTNLDIMIIKSIQLSNFRNYEKLDISFDSETNIIYGDNAQGKTNILEAAYLSGTTKSHKGSKDKEMIRFGEDEAHIRTIVEKNDKEYRIDMHLRKNGAKGVAINKMPIKKASELFGILNIVFFSPEDLNIIKNGPAERRRFIDLELCQLDKIYLSNLSKYNKTLVQRNRLLKDIAYRPDLIDTLQVWDMQLLEYGRHVIKKRREFVNELNEIIQDIHSSISGGREKLILKYEPSIDDIFFEDELLKARSRDLKLCQTTVGPHRDDMLFSVDGVDIRKYGSQGQQRTSALSLKLSEISLVKKNINSTPVLLLDDVLSELDGNRQNYLLNSLSDTQTIITCTGLDEFVKNRFQVDKVFHVVKGQVEVIDEMKQISIREQDEFIKLGQALKKANLVSSGVEAKIVIQDGQVTVNGEIELQRGKKLHDGDVFSYDGETVKVVKMKLICSKANLLKGVNIVSKAVPTRTTMAILECILIDASANEIKLMANDMELGIETIIDGTIEERGIIALDAKIFSEIVRKLPDNDVTIETDASFKTVISCEKAKFNIIGKSGDDFSYIPYVERNESIVLSQFTLKEVIRQTIFSIADNDNNKLMTGELFEIEENKLRVVSLDGHRISIRYIEMKNHYDSKKVVVPGKTLQEISKIIPGSADEDVVIYITNNHIVFEFENTTVVSRLIEGEYFKIDQMLSSDYDTKVRINKRELLDCIDRATLLVKEGDKKPIIMNITDGNMELRINSFIGSMNEDIDIDKDGKDIMIGFNPKFFIDALRVIDEEEVNLYMVNPKAPCFIKDDEGKFIYLILPVNFNTAANMDKVMEKWNEILQMVKEEHGLTDVSFNTWIKPLEVFAIDGNTLYILVPSEQMGLSYINKKYYLPLKVAVGEVTGIEYDIQFILPDQAQSLKFKNNDTPQLEPQTPVKGDHSNLNPNYTFDTFVVGNNNRFAHSASLAVAESPGEAYNPLYIYGGPGLGKTHLMHSIGHFIIDQNPDTKVLYVTSEEFTNEVIESIRNGNSSAMTKFRDKYRTVDVLMIDDIQFIIGKESTQEEFFHTFNTLQTQGKQIILTSDKPPKEMETLEERIRSRFEWGLMADIGTPDYETRMAILRKKAETDNFDIDDDILNYIASNISSNIRELEGALNKLLAFHNLEHTHITMDIAERELSNIITPDKPREITAQLIIEVVSEHFHISVDQMISKTRSSEIARPRQIAMYLCKTMTSDSLDVIGQLLGGRDHSTIIHGIKKVTKDYEENDSTRTLIETIKKKINPNMKMTFQPKKRQRAKVHGFRQRMKTAGGRKVIAARRLKGRKKLSAMKFSDSLKKNKDFQNVYNNGVSFANRYLVMYVLKNNTENNRIGISVSKKVGNSVIRHHITRLVRESYRLHEDMFDSGLDIVVIARVAARHVGYKEIESAVLHLGGLHRIIKKQNIMKSTKCPYCPTCSEYGLQAVQKYGAIKGGLLAAWRILRCNPFSKGGYDPVPMSDILLTAYPGSILGPIAKLLGILMDWIYSGISNITGGRVESVVLSIVIITIIIYMCLLPLTIKQQKFSKLSQKMQPEMQAIQAKYKNKKDQASMMAMQEETQLLYQKYGISPMGSCVQMLIQMPILFALYRVFYNIPAYLSGVKGSFTGLVDSIQQTSGYQNTLVSLMEKYNVVTSSGLNASNAASKLADASGDTLSNYIIDILYKLPSKGWDALMDGKFFDGIQSAVEKTHDALLHFNYFLGLNISDTPWYIIKSNFTDKPDKWLLFVILALLIPVLSYLTQMLNIKLMPQATNGNDQVANQMKMMNLMMPLMSLFICFTVPVGLGIYWICSALVRGIQQFFVNRHIENLDLEAVMAKNEEKAKKKREKMGLSEDYIKKAAQIKTKSIDNKANVSVSAGTEEKLAKAAEYKANAKAGSLASKANMVKEFNERNSRKMEYIEVSAKTIDDALTEASIKLGTTSDKLEYEVIDKGSNGFLGIGSRDAVIKVKKAEVSVEDEIREFLDSVFKAMKLEVTIDIKVDEDNRNVDVELNGSEMGVLIGKRGQTLDSLQYLTNLAINKQSENYYRVKIDTEDYRKRRRETLENLAKNISFKVKRTKRPVSLEPMNPFERRVIHSALQNDRFVETHSEGDEPYRHVVVTLKKMQNDTIAAIATAMSPSGIGIIRISGDDALSVIDRIYKSKNNKKKISACQSHTIHYGFIYDGDEKIDEVMVLLMKAPNTYTREDTVEIDCHGGVYVMKRVLEAVIKNGARPAEPGEFTKRAFLNGRIDLSQAESVIDVINSKNDFALKSSLSQLGGAVLGSIRQIREQLLHEIAFIESALDDPEHISLDGYPQKLRTIVDNEYVEIDGLLKTSDNGRILKEGINTVIIGKPNAGKSSLLNVLVGSDRAIVTDIAGTTRDVLEEQINIGGITLNLVDTAGIRSTEDVVEKIGVKKAMEHANGADLIIYVVDSSVALDDNDYDIINFIKDKKAVILLNKSDLASNVSADDIKKLVDKTVISVSAKESLGIDELSDTIKNMFFDGEVSFNDEIYITNIRHKKLLSDAKESLKLVMNSIDDDMPEDFYSIDLMSAYESLGLIIGESVEDDLMDEIFSKFCMGKMCSKFVEENYDVVVVGAGHAGCEAALACARLGLETIVFTVSVDSIALMPCNPNIGGSSKGHLVREIDALGGEMGKNIDKTFIQSKMLNKSKGPAVHSLRAQADKAEYSMEMRKTLQNTDHLTIRQGEVSEIVTDENNNIVGAKTTSGALYHCKAIVLCTGTYLRARCLTGEMITHTGPNGLLAANHLTQSLIDHGIEMRRFKTGTPARVDKRSLDFSKMEEQFGDERVVPFSFTTDPESVQIDQVSCWLTYTNSKTHEIIRNNLDRSPIYAGIIEGTGPRYCPSIEDKVVKFAEKERHQIFIEPEGLNTNEMYVGGMSSSMPEDVQYEMYRTLPGLENVKIVRDAYAIEYDCINANQLYASLEFKKIHGLFSGGQFNGSSGYEEAACQGLIAGINAAMKILGKKPLILDRSEAYIGVLIDDLVTKKNREPYRMMTSRAEYRLLLRQDNADLRLTEKGYEVGLISKERYDYVCKKKELIDKEIERVSHVNIGARADVQEILKKYNSIELSNGTTLEELIRRPELDYDKLAPIDPDRPKLSDDTREQINILIKYAGYISRQIKQVSHFKKLEKKLLPTDFDYNTISGLRIEAQQKLNEFQPLSIGQASRISGVTPADISVLLVFLEQLKYSNPDLFSRLNPDNTSAEQMKYDFTHFTDELSKIKCTLNNSQLEQFELYYDMLIEKNKVMNLTAITDFDEVIEKHFLDSLFLCHTLDLNAEKNIIDVGTGAGFPGIPLKIAFPQLKITLLDSLNKRVGFLNEVIEALELKDIEAVHGRAEDFARDKEHRAAYDICVSRAVANLSTLSEYCLPFVKMGGCFVSYKSGECESEVSDAKSAIYLLGGKLDKIEQFGYSDNHRSFVIIDKVMNTSNKYPRKAGLPSKKPLMKKSTKNLLFLTSAVIAGMHIYNRVVDSNAERKNSLKVDNGHYYKWKEGNIFYTKTGTGEPILLIHDTDSGASGEEWAKVAKKLAKNNTVYTIDLLGCGRSDKPSIQYTSYMYVQIITAFVNDVIGKPVNVAATNLSTAPVIMANALSKDLFNKIILINPVSLQQLKCIPDKNTKFKQNIINLPIIGTFIYNKLMSPIKVDLLFRNKFISRSQLISDKMKDAYYESAHKGQSRGKYLYSSILSNYINTNIAPALKNLDKDVSIIASTGIKNNMDVINNYHKLNSKCDIIHIANAKLYPQLELPDKTASIIKKIVTNMVKQYLEKTRDEFYDSKYALIEKLTAAENHFKENIKIIQMLEGKSDESFEAFTPREINSYNKSKAKEIKEEQKLIEPQIKSLHKQISDIDYKIDEINSVIRVYNSDETTNEVEISEAISDVINEEDSDAFKRVILQTVESERQRIARDLHDSTVQSLTSLTHKTELCLKLMDVDPIRCRLELTSQGKILKDIINELRNMIYNLRPMSFDDIGFNITVERALDKLRNSNNIRYNFKTSGDEYMVDSLVSLTLLRVIQEACSNSIKHGHAKEINVSLKYEPKSLTLTIKDDGDGFDTSAIPEFTRDDNSGFGLSMMKERIYLLSGKISISSRPGEGCIVKVIIPVNKEDMAINIMITDDHSMIREGLKNLLELDGDIKVIAEAENGEECLDKLKTFRPDVLLLDINMPKMNGLEVLKALKDRKSKVKVLVLTGHNETEYLMKAVDIGINGYVLKDSESAELKKAIFTIADGETYIQPSLIPALNSKMIQKNEDELKIDALTKREMEVLKEMSVGKFNRDIAKEMKISERTVKNHISSIFKKLEVTDRTQAAVFAIRNNIIQIMMQQKSTQKILLFSVAAQKVEKIKALCKTLGISVQQVEKSDYGQKLGAIAGITGFKKDGSRYSGADFPAELLVFSGINSSQMDIFLAEYKKAGIEPIGCKAVVTPDNVFWSADKLFREIFKEHLFMSRMETWYYEVVSIDGDYANLKRCDIESDDLKLVARALLPPEIMEGSRLKYELMQYEIIQMSITATELKNNLGKYLLLSAKEDVFITKNGKIVAKLTNPHQDRVEVAKSLFGILPKDADLNEAKEERLGAKMRILADTNVIIDALTSREPWNKSAEEIFLMAANHTIEMYITASSATDIYYLIRKHLHNIEAAKMIMGKLYSLTGILEVTADDCMDALASAISDYEDAVVEKVASRKDMDYIVTRNIKDYQAGGTKIILPDDFVKLVEEEMFFMMGITDGRKDFDFNQVITCDECGRYGRYQVYMTYMVLSLFFIPCFKWNRHYYVQTTCCNALYELDPEIGRRIARGEDVEILPQHLQRVNPQYGYGFENGSGSTIKRCSNCGYTTTEDFEFCPKCGRRLMSDYDSKIIRKQIRVYGSVQGVGFRYRTEHAAESVGATGWVRNDPDGSVFMEIQGTEEQIDRVFAMVSQGTYVNIEKMDAKSIPVVEDERGFHTRESLGDFWGLWHRMKEKTYEGTKKTQNGLKRMFFSVLAILLQAVFMVYMFTRLNEYAAAINTTTSVLAIILVLGLYNREQTASMTTPWIILILAFPIMGVSLYLLVGLNGAPNKMRARFEEVDSMLLPCLPENADILSDMYEKVPQAAGISTYLAKNALYPVYQNTDVTYYDQASKGLEAQLSDLSKARKFIFMEYHAIEDKESWHRIQKVLTERVQAGVEVRVFYDDMGSIFFIDRDFSEKMEKLGIKCRVFNPVAPAFNMFLNNRDHRKITVIDGKIAYTGGYNLANEYFNVTHPYGIWKDTGIRLEGDAVKSFTIAFLEMWNASERKVPREVDVSQYLLHYDYEAKQSGFIQPYADSPLDNEQVGEDVYISMANKAQRYCWFITPYLIITDEMSHALTLAAKRGVDVRIITPGIPDKKPIYSVTRSFYNQLVKHGVRIFEWTPGFCHAKMSVADDIMATCGTINLDYRSLYHHFENGCFMADCEVVHEIRDDFIRLFTESAEVTEKYRTGRSARRRLGQSIMRLFAGLLMSDIKLGCHVGMAGKDMFLASAREAASYGANVFMLYTGAPQNTRRKEIFELNIDAGWEYAHEHGINEIVVHAPYIINLANTVKPETYELAVEFLEKEIVRTAAMKSRILVLHPGSHVNAGEQAGIAQIVKGLNTVLNQNDDDVFIALETMAGKGSEIGRSFEELKAIYDGVDRKERLRVCFDTCHVNDAGYDIVNHYDDVFAEFDRVIGLEQIAVFHVNDSLNPLGAHKDRHANIGKGTIGYDTLHRLVHDETFANVPKILETPWLCEEGSAKKTIPPYKEEIEWLLKMFEIIVDSAANIPAELCKKYKIKVLSFVNLVNGKEMTCFEPDLTPEQERAKGKEYYDAIREGAEVKTGLISSGIFEDTFREIIEADKDVLYFSLSKNISGNYNSARVAADAVLDDCSNGRKIRLVDSLNASLGQGLLAIYASEMREKGMSFDEVADTIETYPARLNGVFTVGNLKYIARTGRLSGTTALVGNMLSIKPILRGSKDGYIVQFRKCRGRKAVLNELVNLLCDNITDPENQIIGVAHADAYEDSLYVIEQIKKRIKVRDVINTTYDFCTGSHVGPESLAVFFMGKDRELGAMSGILMMVIAIVVLGGAYLLYGRYLQNKWGIDPNAKTPAYEMEDGVDYVPADTNVVFGHQFASIAGAGPINGPIQAAIFGWLPVLLWILIGGVFFGAVQDFASMYASVKNKGRTIGYIIEEYIGKLGKKLFLLFCWLFCILVVAAFADVVAGTFNGFAADKAGEVTKVVANGAVATTSMLFIIEAVALGFFLKYSKFNKWINTLVAIVLLIVAIALGLNFPMYLNLSVWHIIIFAYILIASVTPVWALLQPRDYLNSYLLIFMIVGAIIGVFVANPACNLDAFTAFAIPDANGNPQYLFPILFVTIACGAVSGFHSLVSSGTASKQIKNEKNMLPVSFGAMLMESMLAILALIAVASFGKGEAAAQGLTTQPQIFAGAIANFLSVIGLPHSLVFTLINLAVSAFALTSLDSVARVGRLSFQEFWLDSDTDDDNMSPFVKLMTNKYFATIITLVLAFLLTKVGYAEIWPLFGSANQLLSVLALVACAVFLKKTKRQGCMLWIPMVFMMAVTFTALGMTIYKLTKALFSVGLDLGNSLQLIFAVLLLILGVLVAIQGVKKLCEKSESKKAAAMKALQKVSKFLSDYTSIVVIAIAVVTFLVPNLMAWVNQMLFVDPVSNKFTCQSIIIGIIMFSMGLTLTTQDFKILAQRPFDICVGAIAQYLIMPFLAFGISKALNLPDGIALGLILVGCCPGGVSSNIMSYLCGGDVAFSVGMTTVSTLLSPFMTPLLVSLLASGTHVSIKALPMFVSIIETVIFPVAVGFLLNYLLGKKKAFAEAQKVMPGIAVLGLAFVVGGVVSSQGSKFFTSGVVIFAAVLLHNGLGYLLGYGAGKLVGMNTAKKRTISIEVGMQNAGLATNLATTTAQFASTPESAIICAVSCTWHSISGTLLAGAFALKDKMAAKKAEEAAETKTAMSTYYTIMSMIDGFESFINLAVMVLTIVASWIMYAKAGEHGWAAIVPFYSSYVRFRIAGKKKLFWGYLVATIGIIVGCIILMYEIIASGLSVMTSSYMGSYYDSTYGYAGSRIGAHMGMLIFAVILIIAAMIVALVMSILCCVGLSHAFGKGAGFACGLIFLNVIFICIIAFNKNIVYVGDGYNSNNNYYNPYGSNGYGQQYGQNMYGNGANQQYGQNMYGNGANQQYGQNMYGNGANQQYGQNMYGNGANQQYGQNMYGNGANQQYGQNMYGNGTNQQYGQNMYGNGAAQGGDAQNSYGTSQQQSWNDEYNNKDYEMKHNYISTGFDGNKYISAILTESCRQVRGARKQIWNTSRSFAPNVIPDDMTIYDELVARGLIAQVTDEKEIKELINNGKATFYIGFDPTADSLHVGHFMALCLMKRLQMAGNKPIVLIGGGTAQIGDPSGRTDMRQMMTTETINHNVECFKKQMSRFIDFGEGKAIMVNNADWLMDLNYVDVLREVGAHFSVNRMLTAECYKQRMEKGLSFLEFNYMIMQSYDFYTLFQKYGCNMEFGGDDQWSNMLGGTELIRRKLGKDAYAMTINLLLNSEGKKMGKTQSGAVWLDPNKTTPFEFFQYWRNVSDADVLKCIRMLTFLPLEEIDKMESWEGAQLNEAKEILAFELTKLVHGEEEATKAKEASHALFAGGANNANMPTVTVTAEDFPDGELDIISVLVKAGLCDSRGDGRRNIQQGGVSVADEKVTDISTKYTLDDFKGEGLIIRRGKKKFAKVVAEMKKRSKILASLVLAGTMVLGLAGCGDSGSANGGTQSGKNSDAKYQVGICQLVQHEALDAATKGFKDALKDKLGDDVSFDEQNAAGDASTCSTICTKFVTNDYDLILGNATAALQAASAATDSIPILGTSITDYATALDMSDWSGTTGKNISGTTDLAPLDEQAKCIKELFPDAKNIGIIYCSSEPNSIYQSTTITKYLEDEGYTVKEYTFSDSNDVAAVTQSACDASDAIYIPTDNTAASCTEAINNVASQAKKPIFAGEEGIAKGCGVATLSISYYDLGYTTGEMAYDILVNGTDIKTMEVKSAPKFTKEYLPDRAKELGITVPDGYEEISAEMILMNYFATLNPVAFTNALPGNIAQGLIWGIMALGVYITFRLLDFADLTVDGSFATGGAVTVMMTINGYNIWISLLCACIAGLLAGLCTGLLHTKLGIPPILAGILTQIALYSINLNIMQRHANQALSADKYNLVLSSRNLTHAIIVGVIFSVVIIAVLYWYFGTEQGSAIRATGCNPAMSKAQGINIDNMKLIGLALSNAIVALSGGLLSQYSGFSDVNMGRGGIVIGLAAVIIGEVLGDAILGKHMNFMGKLIFVIFGGIVYYIVIGIVLWLQMPSDDLKLFTAIIVAIFLAVPYLKGKSKASFKKAGKRSAAALNAKEGKMLEIRNVHKTFNPGTINEKHALNGVNLKLEEGDFVTVIGGNGAGKSTMLNAVAGTWPVDDGSILIDGVDVTGLPEFKRASFLGRVFQDPMTGTTATMQIDENLALAARRGKRRGLGWGITKAEKEHFHELLKELDLGLEDRMTSKVGLLSGGQRQAVTLLMASLQKPKVLLLDEHTAALDPKTAAKVLTLTDKIIKENSLTAMMVTHNMRDAIAHGNRLIMMNNGQVVLNISGEEKKNLTVEDLLMKFEEVSGEKFASDKALLGMKILKSILNYIPLATFIIFVVTDGIISLTSALIFVISSIGLLINWKRKKPAMKNMLQKILRFLDYIIKGSYKAGGNKHIFTDQELYEEYNLTDEEINIIESVIKERKMTIVKNQHQAEEITQNTFYKAMTAKKAYAGKSSEQTWLCSIARNLAMDECRKTTKFTELDEEQLEQPDNMVKSLENKDTALQIHLILHELDEPYKEVFQLRIFGELPFSQIGMIFGKTENWARVTYHRARLKIKERMDRNEMNNPITQSTDETCNIVQDLLPLYYDDVCSPSSKRLVEKHLKTCEKCQNTYNELKNDSIDSMIKKEADSVLKQHEKKEKSAAYKTGVIIAGLLLIPILITFIVCLSNGGGLNTFAVVTASMLLVAAMTVVPLMAQQKKLTKCIICSVFALLLIFFFVDRMYSSNEFMLWSVPTIFGLSIVLFPFVIRGIELPPALSDKKALITMLWDTLWLFLTIIEVCGHTNDVAGMKAGCIIAFVFVLAAWLIFFDARYLNANGFIKSAIIVLIASVWTAFADDICEFLIFGTRQITIKSVNFSDWTSNICVNANVYAIVLVSGVIIASILFVAGGIKAFANKKMSYVDEVLEVVKKKNADQPEFLQAVTEVLDSLRPVIDANEELYRKNAILERITEPDRQIMFRVPWVDDNGQVQVNRGFRVQFNNSIGPYKGGLRLHPSVNLGIIKFLGFEQVFKNSLTTLPIGGGKGGSDFDPKGKSDREIMAFCQSFMTELCKYIGADVDVPAGDIGTGAREIGFLFGQYKRIRGSYEGVLTGKGLTYGGSLARTQATGYGLLYLTNALWKDHGMSLEGKTAAVSGSGNVAIYAIEKAQELGVKVVTCSDSTGWIYDPNGIDVALLKEVKEVKRARLTEYAAAKSTAEYHAKQNGEHGVWQYKVDLALPCATQNELDIEDAKMLVANGVTSVTEGANMPTTLEATKYLQENGVLFVGGKAANAGGVATSALEMSQNSERLSWTFEEVDGKLKGIMETIYANISDAAKRYNATVGGKTDYVAGANIAGFEKVVDAMLAQGVCMTADETLNELLVCLFKDLTEIEGRCLITDEFSDISINDMHIIEAIGVDEPKRSGTVAKLMSITLGTLTKAIDGLTHKGYVNRIRSEEDKRVVKLSLTDKGKSAYYHHEQFHRHMIEHIKDDLSDDEMKVLITSLAKLSDYFKVVYSDDEENQYQNWDNINEDNKMKIVGTGSCLPQRVVSNDDLAAIMDTSDEWISSRTGIRNRHIATTETTTSLACDAVKSALQDAGIDGSEIDLIIAASVSTDKIVPSLACQIQAEIGAGSAVAFDINAACSGFLFGLATADAYFKTGRFHKAVVVGAEVLSKIMDWNDRSTCVLFGDGAGAAVVTDEGDAFKGFVQGSDGKGGEALDGDNRPVVNPFTDNGKQSALGGYVTMDGPAVYKFAVKTVPKAINELLDEIGWSADDVDVYVLHQANIRIIESVAKRLKQPMDKFPTNLQQCGNISAASVPILLDKVRKDGMIKHEEKIILSGFGAGLTWGASAIEWQMKLFKKKDKNIEADEALAKNAESAKTAADGKNAGAAQETKEDVPETIVCPKCGKTVLKSVVKQHKYVCYECNYYFRVRAKNRIRMVSDKEAFEPWFTELTTGNPLNFPEYEEKIAKTQEKTGLSEGIVIGKTKIYGEETVLGVIDSRFMMGSMGHVVGEKITSAFERATEERLPVILFCCSGGARMQEGIISLMQMAKTSAAAKRHSEAGLLYVPVLTDPTTGGVTASFAMLGDIILAEPKALIGFAGPRVIEQTIGQKLPEGFQRAEFQLEHGFVDMIVEREDLKKTLYKILRAHRPTTGYANFDPLHSDDNYEPTELMKEREAKAKPFKVWDKVSAARQIKRLASVDYMGYIFDEFMELHGDRYFRDDPAIVGGIAYLDGQPVTVIGVHKGKDLEDCAKRNYGMPSPEGYRKALRLMKQAEKFNRPIITFVNTSGAYPGMEAEENGQGEAIARNLYEMSGIKVPILCLMIGEGGSGGALALSVGNEVWMMENATYSILSPEGFASILWKDGKRAKEAAEVMKITAHDLKELDVVDDIIPEFGGADEDALSSIGNYMKGNMKKFLEKESKLTKDQLLEERYKRFRKFMSVLNTQQIMDILPHRSPFLLIDTVEELQPGVKCVAKKNVTMNEPHFMGHFPGNPVMPGVLIIEALAQTGAVAILCQDEWKGKTAYFAGINNAKFKQKVVPGDTLELTTEIIKVKGPIGVGKAVARVNGKVACMAELTFAIGMKHKVFHKPKLRTCFALNNVEPGSTQCVLNEKYGLSRRSIHSNSMKHMSRRVVVTGLGAVTPIGNNVDDFWAAVKAGKIGFDHITKFDTTDYKCHIAAELKDFNPQDFMDRKAAKRMEPFSQYAVAAAKQAIDDSGLDIEKEDPYMVGCAIGSGVGSLQAMERETQKLYEKGPNRVNPLLVPLMICNMAAGNVSIQFGLKGKSINDVTACATGTNTIGEAYRSIQYGEADVMVAGGTEGSVCPIGIAGFTALTALSTVDDPTKCSLPFDKNRSGFVMGEGAGVVILEELEHAKARGAKIYAEVVGYGCSSDAYHITSPQEDGAGAARAMTNAMSDAGVTPADVKYINAHGTGTHHNDLFETRAIKLAFGDEAANLKINSTKSMIGHLLGAAGAVEFITCVKEIQDGFIHKTVGYETPDEEIDLNYCKDSYEEPVEYALSNSLGFGGHNASILLKAYKMLTGKNALVTGASRGIGRQIALTLAAAHAFVIVNYNGSKEKADAVVAEIKAAGGDAVSYQCNVSDFDECQNMITALIKEYKHIDILVNNAGITRDGLIMKMSEADYDAVLDTNLKGAFNTIRHMSRYFLKQKSGRIINISSVSGILGNAGQANYSASKAGVIGLTKAVARELASRGITANAVAPGFVETEMTDVLADAAKENLLSQIPLGRPGNTKDIANAVLFLASDAAGYITGQVLSVDGGMAIMGKRVFMFPGQGSQYIGMGKEFYDTMPNAKAVIDLASEQTGLDIPALCFEENDKLNITEYTQICMLAVEAAIYQAIIDKGITPDVTAGLSLGEYGALIASGAMTMADAFAVVRKRGIYMQEAVPTGGAMTAVLGLDPQVIEDICKKTADETNSVVSVANYNCPGQIVITGEKAAVDAAAAACSEAGAKRCVPLKVSGPFHSAMLKGAGEKLADALESVEIHDIEVPYITNVTADYVKSPADVKDYLTKQVSSSVRWQQTIERLIADGADEFVEIGPGRSLSGFMRKINRDVKVVNIDKLEDFEKYVNRMETRITKLLGIKYPVIQGGMAWVATHELASAVSNAGGLGIIGAGGAPASWVKEQIVAAKKETDKPFGVNLMLMNPEADEIAKIIAEEKVKVVTTGAGNPAKYMDMWKEAGVIVIPVVASVALAKLMERGGASAVIAEGMESGGHIGAQTTMTLVPQVVDAVSIPVIAAGGIADNRGFNAAFALGAEAVQMGTRFVTAKESIVHENYKQKVIKAKDIDSEVTGMSTGHPIRVLRNKMTRQYLKLEKEGAPFEELEKMTLGALRKAVVDGDTVYGSVMAGQSAGLVKKEETCKEIIEDVVGLNKMLEKIKEIVADQLGIDEDDIKLESNFKEDLEADSLDLFELVMALEEEYGVEIPSEDLEKIATVNDIIEYLKNKGVEAMVPPEAEQPSRFFFAVLSGVVFFAAYAPVTIGNKTIDALIYSVTYNGSYLAAEGIITIIVISIPPVKKALDYVKMAKQKKKKKKKQHRVFWFFIKLQIFLMVLILGGLCFYYFGGYADKVAKLHSEAVELVQKSDKNTFLPARTSTLYDTNGDEISETATTKKADYVKYEDIPQNFVNCMVSIEDKKFYKHNGVDIKAIVRAAKSIIKNKRITQGGSTITMQLARNIYLDTNKNWQRKVKEMFIAMALEKKYSKNDIMEFYLNNVYFMNGYYGIQAACHGYFNCELSDLDLSQTAFLCAIPNSPTYYDPINNKDHTLTRRNLILKNLKEDGKITQQEYEAAINEEITLNMPEKDDTVKYNYVDTYAYYCATRALMENEGFKFKYYFDSDDEEKEYDASYDEMYSYCQKKLYSDGYKIYTSIDLTMQQQLQDSIDLTLLDFTDTTDDGTFKLQSAATCIDNDTGEVVAIVGGRSQDAVSHTLNRAFQSHRQPGSSIKPLIVYTPSFERGKTPDTVVNDHKFDGGPSNSGDSYYGDVTIRFAVQKSLNTVAWQLYDELTPKVGLQYLKDMNFTNIVKDDYVTATALGGFTTGVSTLEMASAYSTLENDGMYRNPTCIKSIVDSDNNIIYTSSQKETIIYTETASRMMTDVMTDVMKSGTGRSANLDNGMPCAGKTGTTNDKKDGWFCGFTRYYTTCVWVGCDMPESVKKLTGSSYPAEIWKNYMDQIHADLTPIDFLPYAQISDDYQDSQETQDTPADDQTQNNPTDQTVTTPDAGTKAPDKTTTNPNKTDAAGGNTGGNTGDNTDGTTGGNTGENNGGNTGGNTGENNGGNTGGNTGENNGGNTGGNTGENNGGNTGGNTGDNTGGATGGTTGGGAAQMKITGLTRRVDSLGRIVIPKELRRMLHIKEGSPLEIYMDADETIVLKKYSQVGSLKNMSQAYAQSLSKVTGATVCVADRDEIIAAAGKNHKNYIGKALSKELENIMDKRKSALYSKKDDTLIPVVKDDKADCEAQAIAVIVHDGDSAGAVILCTFDEKADKSEIAEKLAGAAAEFLADQLGMIHIIYMAAGNSRRFGSNKLFYELDGKPMYRHLLERLIEIKDRYNKLKKAGKKIKNAESNNPVIDITVVTRYREILDYCACIPDCHAVLSPDSEKGISYTIKAGIMAVQEQKKTGMQMLQSSVWQKKPEKNSGSLLNTAETEDYYMFAVADQPYLKSQSVIKLIDKVLENKGNMRLAFSLRCGDAVGNPCVFHSSLIPQLLSLEGDKGGRSVAKKYDCVYVDIADERELMDIDTLSNSKHTVTLMSTNQTNENSFNRARRDYHAVGKCIPKKDSSQLLLGKPVFTDDITPRDALVIKLLRSPYANAIVEDVKTDIALKVPGMVAVYTWEDVPKKRFSIAGQTFPEPSPYDRLILDRHVRSVGDAVAIVVGESEKAVDKALNMIKVKYTVLEPVLDFRKSLDNKVLVHPEDDWSSSIDTGDVKRNLIHHEEDEHGNVEKILSECDEIIEHTYRIKAAQQAYMETCRAYCEIDRYGRLHCISSTQIVFHLRRILANALDIPKSMVRAEKPRIGGGFGAKQTAVCEVYPAFVTWKTKRPSKIIYSRKECQTITSPRHEMEVTVRLGAMKDGHIRAIDLYTLSNGGAYGEHSTTTVGLSGHKSLPLYTGGCEATRFSCDVVYTNVQAAGAYRGYGATQGIFALESTVNELAEKLHIDPVELRLKNIVREGMFMPAYFGETANACALDRCIMHCADNFHWAEKYPVRDMGNGKVRAAGMALAMQGSCISNVDVGSCTLKLSDCGTYNMMIGAADMGTGCDTILAQMAAEVLDCEPDDITVFGADTDASPYDSGSYASSTTYITGMATQNAALELRENIKKIGAQMLGCTASEVDFDGKEVYIINPDGTDNGAVSVSLSDIATKSQVNNTIPVDVTATYSSPVSPPPYMVGMVEIELDKETGAVKILDYQAVVDCGIPVNPNLARVQTEGGIGQGIGMALYENVTYNAGGKIAENDFMQYKIPTRQDVGHINVEFETSYEPSGPFGVKSIGEIVINTPAPALAHAIYRATGVWHRTVPFTPEKILMGMVDPDWHEKDLRVKMDVKIKLNGKLITDSVDQDMVLLDFCRKHNCFSVKRGCESGNCGLCTVLLDGKPVLSCSTPIGRADGRAVDTLEGLEEEAKQFTGFFAAQGADQCGFCNPGYIVNIVALLRENPDPTDEEILEYLSGNLCRCTGYQSQLRSIRNFLNSKKEGAPLNLEAGVYGEDIGKEWQDEHKSNMFYYNQYVRAQSLDEAYELYQKKPNFVLGGMLWLKMKNKTLGTAIDLCDLGLDRIDEDENEFRIGAYATLRQIETHEALNAYTHGAIAESVRHIVGVQFRNVATVGGSIWGRFGFSDVMTIFRALGAKVQLHKAGIMDLDEFAALPRTTRDVLVSVIVPKNAKGVVYLSQRNQSTDFPVLTCAVANRSGRYVAVIGASPYMAEPVWDEEGILDCLADAKTDGNAALTDNSENNAKIDKFAGYVAEHIRFGSNIRAGAEYREIICRVLTRRAVTQSLDICDEIKHEHMDKNLAREKKKRLIITFETTTAPLKLDIKGKACGIPGRTIPLPSVISAGCGLAWRAELSDRDCLIAFMKEHDIRWEAMYEIEMRMITVNAIGDTCPIPVVKTKKAIEALTQPDTVETLVDNEVAVENLKKMAVQKGYSCDSSKLDDGSYSVKLTIEAVNADELSDTDEASQYTCRPAADNRVVVIRSSYMGEGSEELGKVLIKGFIYALSQQDNPPETMLFYNGGAKLTCEGSESLEDLKELKSRGVKILTCGTCLNYYELSDKLAVGEVTNMYDIAEKMAGASLIVSPMPQEIVFCKGGGCTAKLGPDLLSHVLAKLPRGEKDSNLLIGYDSCDDAAVYKISDDTAVVQTLDFFPPMVDDPYTFGQIAAANALSDIYAMGGTVKTALNIVCFPEKMDLNILGKIMQGGADKVIEAGGTLAGGHSIADSDVKYGLSVMGTVHPEHIYSNNTGQPSDVLILTKKLGVGLVCNANRVGEAPLGAIEDAVSSMTTLNKAASEISHAFDIHACTDVTGFSFLGHLSEMLNDDITALIDSISIPVITGALRCADEFFLTAAAQRNRNHVGDKVCFAKNIPFSMEEVLFDPQTSGGLLFAVKATEADAFLHELKAAGLPAAKVGRFVKRRDVPIYVNMIYLDNAATTIKKPDAVYDAVLDAMKHCGNSGRGASDASLDASRKIYEARMCLTEFFGGDDAARLVFTANATEALNIAIHGLFEPGEHVITTQLEHNSVLRPLYMQRERGVGLDIVPCSDVGIKRGIISPSDIEALIRPDTKAIVCTHASNLTGNVVDIKSIGQIARKHNLLFIVDASQTAGVLPINVKDMNIDVLCFTGHKGLMGPQGTGGLYVGERADIKPFKSGGTGVLSFLENQPMELPTRLEAGTLNGPGIAGLLTGVMELEKIGLDNIYAKEHELMQVFMGKIKTIPGIRIYGDFDMLPDNGLHCAIVSVNIADMDSAEVSDILMNEYGIATRSGIHCAPLMHKFFGTQNQGMVRFSFSYYNTVDEINEAAEALMQIAALRMSLIVKIKKQLDNFMLSVDMELTDEVVSVIGMSGSGKSMTLKCIAGIETPDSGFISLNGRVLYDSKKRINLHPGKRRVGYLFQDYALFPTMTVMENICIAMGQRNEEKVKGWLKRYGLEGMAYTYPNHLSGGQRQRVAMLRMLAAKPECILLDEPFSALDEHVKRSMESELMEMLTDFHNPVVFVSHNRDEVYRLAERIGSMESGVLSTVRDKKDFFMRPMSVEQALLVGCNNISEVKWQDKHHLFAVEWDSVFEVTDEQLEQTAMSMDGISHIGVFPQDIIISAGKTKTALAYADKNIIRIKDYKMIEELKSWEVLCKLNNDSIIYASLPRHTEANMLSKNINDELYIKNFYLLGMGQIDFSPLWVTLKTGIVASVFSFFIGIAFAELVINTKGRVRAFWDGLLTLPMVLPPTVAGYILLRIFSTRRPFGSFLSHSMGIQVVHTWLGCVVAATIIALPLMYRNARAAFEQIDENVIYAARTLGISEWKIFWKIRLPMAKPGIISGVTLAFARAIGEYGATSMLAGNIAGKTSTISQQIAMVVQSGDYATAGFWCIVIIAISFACLVSINMICGKSKGIKRKRKNNVAHSKNKKTVGMSLRIATGTDGPRKERKGLKRKFAAYAGLAFGLILIAGLFAGCGKKNTADADVDLSIFAAKSLNGVMDEICAAYTRAHPNVNFQNNYDSSGTLMAQIKEGAKCNIFFSAGVAQMDELQNGYDGGSVVDGTRVDLLNNQVCLVTYKNSGTAVTGFADISKAKNMALADGTVPVGQYTRAALVNSKMVEGDASKPQDISDSDISKALDGLEINSCANVGAVASAVAEGANEIGTVYYSDTFGYENQLDIIEKLPNSLTGDVIYPIAALKGDSTTSDELEAAKEFIAYLQTDEAMSVFEKYHFSVKEMGKLLAINISKERGTEKREVPQAELVADYGIMGDAHAGKWHRQVSLLSAEKIDAFRARGAQIDNGAFGENLIISGFDFKNLPLGTRFCIGDAILEMTQIGKQCHSHCAIYKRMGECIMPKEGVFAVVIRGGQIHTGDEVKLIPANIYASIKDRPADSRCELLTVIEGAHAGEKALYIDGRIRVASGSAWADEINDNDNSIVMFKQQIGSRPRLIICGGGHVSAALVRMASLLAFDIWVIEDRPLFADNAKRQGADHVICGDYKKTLARLEPQADDYYVCMTRGHRFDMECLTEIFRKPYAYVGMMGSKKRAVIVKKDLEESGFSQENIAGLHSPIGLAIGGQTPEEIALSVISEIVKCKNERTSCTQVDNEVLDALIEASDEKYILCTIIKKNGSAPRGVGTQMLVSSDNRIIGTIGGGCAEAEVISHCRRLFRKQEFKCGLMDVSMNTDDAEKEGMVCGGSISVLLEQIGMRDRFGREIDYMRISVIDSCNLNCYYCNPQDNNKNCQVINTLSVKKVLCIVRAATRIGITHFRLTGGEPLLHPQIDEMVSQIKKIPGVRSVSLTTNAVLLAQHAKQLKEAGIDSINVSLDTIDASEYEHITKKPLLHKVEQGIDAAIECGIRVKINVVLTPQTDVVALTRYASKKGTDIRFIEMMPVGEGHTNGVKPYEKVIGALLEVYGTSCHIDTENREEINSGYNNADNGPAEYYSFHGLDIRVGLIQAIYGKFCDTCNRIRVTADGRLMPCLGSSVTMDLVPDSCEFTDDLEKDFVIVQALKAAIKAKPGCHNFNDNAVTYTKTTETKTVETKATELKAAEVNAARNMSRIGGMKLMKTTEAVGQVLCHDITQIIPGVKKDAVFRKGHIITKEDIPVLLSVGKDTIYIWENDETMMHENEAAEVLYRMSACGTNSNETDVERHCEAAESGVFGGTASKMHPSPVKEGKIEVIADCDGLLKVDSEKLKKVNSFGEMMVATRHGNTTVKKGDKLAGTRIIPLVIKKDKLEAASHICDDGPILDIKPFVVRKAAIITTGNEVFHGRIQDAFTPVIEKKIAEFGAQMMFHEVFDDDDKKITDGCLRAIEAGAEIVFCTGGMSVDPDDKTPLAIKNTGARIVSYGSPVLPGAMFLLSYYDAGDRLVPICGLPGCAMYNKRTIFDIVLPRLMACDMILADELAGLGEGGLCLNCDVCTFPNCGFGKGFMYTVGIITISDKGATGQREDKSGPKIKELLPKDKYDVVSYKIIPDEREQIADELVRLCDDVKCNLVLTTGGTGFSPRDITPEATMDVAERNAPGIAEALRAYSMSLTPKAMLGRGASVIRKNTLIVNLPGSVKAVSESMDFLMGNIEHGLDILLQYDSECGRMTQENELDINNQEQNKGKLTHFNEAGEAHMVDVHAKDDTYRVAKACGTIKVNGAVYRAVSTGTAKKGDVLAVARIAGIMGAKNNSMLIPLCHAIAMTKCDVEFELDEKNSSITAICTTACVGKTGVEMEAMTGVSVALLTIYDMCKALDRGMEIGQIHLLEKSGGKSGHYVAVHNMSMNQSNNQIIKKNLLIICRGAGDLATGIIHRLHRAGHRVIALETDYPAAIRRQVSFCEAVYDGSAAVEGVTARLVPALADAETDTETYSGINDTPAAHIVSEKWDSSAIEAVLEAGEVPLLIDPKGESIALLKPDVVVDAIIAKKNLGTTINMAPLVIGVGPGFTAGQDVHLVIESMRGHNLARIITDGMAQPNTGVPGNIAGFTSERVIHAPAAGYIHDVRKIGDIVQKGDEIARIYPDKESYDNALSEYVPVNATITGIIRGLIREGYYFRKGFKIADIDPRESELTNCFTISDKARSIAGSVLEAVSAFEHGVKIYMEKVISIVGAGGKTTLVHKLAREYHRGGKGVLVTTTTHMYVEADTDLSCDFFALRDKIIKDGYCMAGQKISEQSKSKMCGLPYDLLDKLIKDMPQALDYVIIEADGAKHHSLKYPAADEPVIYPGTTDVIIVLGTWEKGRSCKDVVFRYELMQKELGTAEDAVVDDSVIDTLRQVYVRKLRDSGFEGRVSCVFANERGWFMKKTTNSSPYQFEGRIPLSQAIPLGLQHVMAMFIGNLTPLIIVMGACGLTADAGFAELRTALLQNAMIIAGIVTLVQMFSIGPVGGKVPIVMGTSSGFLGVLNNTVAACGGGVIAYGAIMGACLVGGIFEGILGAFLKPLRKFFPAIVTGSVVIAIGLSLLGVGINYFCGGTGKNDYGSLPNLFIGMVVLIVIVLLKHFAPSRSIFSSSAILFGILAGYVVAIIMTLTMSHTGVTADGVKYTYSWVVNFDEVKNAAWIAVPSFIGFGKLSDVGISFHANAIIPIGIMFIVTAIETVGDISACVEGGMDREATDSELSGGVICDGLGSSFAALFGVLPNTSFSQNVGLVSMTKVVNRFAISMGAIFLVICGFCPKIGALMSIMPQSVLGGAAVMMFASILISGIELITKEPIGSREITIISVAIGLGYGLGATTGATSHLPYYVQLIFGGSGIVPCSLCAILLNIILPKKSKNAPYMWDMDEKDDVKRVDDMFYILRHGRTDWNEEHRLQGEVDIPLNETGRQMAYDAAEKYKDIDFDICYCSPLKRAQETARIFLADRNPAVEIITDNRLHEMCFGDYEGVKNIRQKPECPVYLLFEEPEKYVAKDGAESFEELYHRTGEFIEQVLRPQLEAGKNVLVVGHGAMNCSIVNQFRGTPIKDFWKDMQGNCELLRVEMWNTINNFLSAVDNFVWGVPLMVLIMAGGIMLTVRLGLLQMRKLPLALKWMVKNEEGGDGEITSFGALCTALSATIGTGNIVGVATAVGAGGPGALFWMVLAAFFGMATKYSEGLLAVKYRVIGKDGHSLGGPFYYIEQGMGAKWKWLAKIFAFFGVCVGLFGIGTFSQVNGISSAVNNFFDPKNQHTVKVLPFLGEYSWSVVIASLVLAFCVAAVLIGGVKRIASVSQIIVPFMAVIYIVFVLVLVVCNITAVPAAFATIVKAAFSPKAITGGAVGSFLVAMQKGVARGIFSNEAGLGSAPIAAAAAQTKEPVRQGLVSMTGTFIDTIVICTLTGLSIVLTGAWQVDGLEGVQVTTYAFQNGLPLPKELSAFVLMLCLVFFAFTTILGWDYYSERCLEYLSGGRMKYVKVYRWIYILAVFIGPYMTVSAVWTIADIFNGLMALPNMIALFALSGVVVKETRHFFERHRNGEIEDMRKTKIICTIGPASEHEDVLTRMIKAGMDVARLNFSHGSHEEHQGKIDLIKKVRQKLHMPIAIMLDTKGPEYRIKTFENGKIELKDGDTFTLTTDDIVGNQERVSVNYENLIKDLKVGDRVLVANGIIILQVRELKGNDAICDVIAGGTLSDRKSMNFPNKVMKHAYLSKQDKDDLLFGIKNEVDYVAASFVSTKQDVADLRSFLDENGGEDIEIIAKIENRSGVDHVEEICEIANGIMIARGDLGVEIPGVEVPAIQKYLINKCRMLGTRVITATEMLESMIHNPRPTRAELSDVANAVYDGSSAIMLSGESAAGKYPVEAVKNMAETAEYTEKQINYGKRFANADFQTKSIVDAISHATCAMAIDVDAKCIVVSSLTGRTVRMVSRFRCPVDIIGMTTSEKAWRKLNLSWGVKPVLCEEYNSMEVMFYNAMNEAKSVMKLKKGDHIVLTGGLINGKTGNTNVIKVETVMQQRITINLNTDSKTTDKTTILEYCRSHGIAGIETPCGGKGTCGKCKVTVAKPYYKDVLACQTKICDGMEIIVGRKESTGTKEDSMVVLTNGGNVSEKFNEHVNRNVEDTLAACDIGTTTVVCYLIDKETGQIISTRSGANPQRSFGADVLSRIDAAARADDNDKANGGLQMMQTQIVSLLNGWISEMLTECGRTKVSRFSVAGNTVMCHLLMGISPEKMGKAPFMPDEYFGRKFNPLDIGLENCQTMIIFPAVSGFVGGDITAGMMETVNCNELTLYLDIGTNGEMALGKGDRYVCCATAAGPAFEGAQIELGMPASKGAVDKVWLEGRRIKYSVIGNDRPVGLCGSGLIDALAVLLKAGIIDENGTILSGQELPILFRSYVFEVEAEETAQSTEPSLAVHIAPGVYITQEDIRKLQLAKGAIAAGIEVLFKEYGCKPCDLDILTFAGGFGNYIDKASAAAIGLFPQELLDRAKEVGNAAGNGAVSAALSQEAWERALDISGDMRYIELASYPHFDEMYVEHMNFMDKKITDSIIYIGVDDKDIDLFESQYVVPNGVSYNSYVIMDDKIAIMDTADARVTDKWFANLREALGDRKPDYLVVSHLEPDHASNIQKVAEAYPDMQIVGNAKTFNMMGQFFDIDLTDRKVVVAEGDKLSLGKHELTFVMAPMVHWPEVMMEYESTDKVLFSADGFGKFGALDTDEDWTCEARRYYFNIVGKYGAQVQAVLKKAAGLDIEKICPLHGPILTENLGFYIDKYNTWSSYQPEDEGILVACASIHGNTKKAAELLAEKLKATGVKVAFTDLCRDDMAEAVEDAFRYDRLVLCACTYDGGIFPPMEDFLHHLKAKAYQNRKIAFVENGSWAPTAARQMKAIVEGFKNIECVEPVVTIKSTLNEASEKQMDELVAALTRMQVIGYNETRTDIKYDKKEDVVNMCKAWDDHKKLGIQEGIQQGMQYRMNYIGTQNFETKRCFLRRIKLSDYTMMYENWAKYDEVSRYYPFNPVDDIEIYRDKVKHWISNYESGSYFHWVIEWKETGELIGTINLGNVEEACHMCDTCYMLSPGFWNKGIMTEVLEAVLDYAFDRVGFNRVQAEVFYGNDASSAVLKKCGMVLEGVARQKYYKNGEYIDTALWAIIAGDRLMTCYLASIITDEKYNDKLTSVCYNQLKALYFCKYDTTAYFSGVYHFEEGRPLRIFRQRHGNFQCFMLPVNSRKIEMSDVKTLREKRGVGILPAFILAYSILIRFRIFLLTQEEEVNLGTKDSKAKEYLSDNTRFSEICNYVLFDGEKVIKPENLKECDTTEVLSVFGIDRKQIVKQKWRDLLKGVSVKYTESVYIVLMGIEAQTDVHYSMPVKTMIYDAMNYGEQVNEAKKQHQKNKDYKSSDEFLSGFTHEDRLTPVITITLYLGTKNWDGPRSLVEMMPHMDERFRPFINDYRINLLNPLEITDFSKFKTGLRPLFEVLKNASDEGKLNDLITKDETFTRVDVETVAAINLFAGTDIKYDEKEEVVNMCKAWDDHKKRGIQEGMKQGRCLEVYSLVQDGILDPEVGASRVSMSLDDFADAMQKAGYKLPEMVMGVKTAAMKPQINRFFERIINMIIDRERVKNTFAEYTSGYNATDPKIKLKIDHTYRVAELCELIARDLKLDEYETDVAWLTGMLHDVGRFEQIKRYNTFNDAQSVDHANFGADLLFKEGLIDTYVDGFHDDKYGTIVENAIRNHSAFRIDERLDDYTVMFCNILRDADKVDIFRVNVDTPAEDIYNVTTEELKNSQVSSEVMAAFDERHAVLRSCKKTAVDHVAGHIALTFELVYPISLQIAKERGYLDKMMAFESDNEVTGKQFEEIRAKLNEYVESVKPLMYLVSVYFDKTAVHILQRYINKIAEKTGNSFMVDNNVPPHMTISAIEARSENALLGAMDNLRNSLSNGTISIVSVGQLLPYVFYATPVLNGYLQDLSEKVFDEMKSIPECAVSRYYKPMSWLPHITLGKKLTKEQMQMAFSVMQESFVSFEAAITEIGLARVNPHRDVVRWELKQQQMENKIDSSFERSLLFRVAAIIVCIIIACISFFGLAKSYSSPESKINKETIKYLDEKKTTALELSASATAVSTLITLAPGDDGTPVANKLMDLAGYFLIVVSAIYLEKYLLTILGALTFKWLIPVSMLALAVYFGSKKELFWKIGVKIFIFGLAIYAVIPVSVHVSKMIYSTYQESIDATIDEANDLADESEASKDDDKDSKKSKGSESSFIDKAKDAVNSVKNTLSVTANSVKNMVNKFIDGLAVLIVTTCLIPVLVIVFFIWLMKLVLGSAISSPGAVAMRRGKDKMLSVIEKVNDVVNNFIWGVPAMICIIGVGLLLSFRTGFIQIRKFPYAMKVTLGRMLKKREASDGALTPFQAVCTALAATVGTGNVAGVAGAIAIGGPGAVFWMWISALLGMCTKFSEVTLAVHFHERNANGDLVGGPMYYIKNGLKKHWHWLAYLFSAFGVLTVFGTGNATQVNTITTAIDSALYNYDIISKESASTFNLIIGIVLAALIALILLGGIKRIGQVTEKLVPFMAVMYILLALGVVIVNFKAIPGVFGAIIEGAFNPSAVTGGAVGSFFMSMKKGVSRGIFSNEAGLGTGSIAHACADTKKPVKQGFFGIFEVFVDTIVICTLTALVILCSGVSVGYGEAAGAELTISGFTSTYGGWVSIFTAVAMCCFAFSTIIGWGLYGTRCIEFLFGTKANKPFMVVYSLVAIVGATMNLGLMWSIAETFNGLMVIPNLIAVFLLSGVVVKLVKEYFAGEGAASTLKNSREEGKRTFLMIPFDPLIILYKNKHPDIDKLLYPGVFYKEKLQKNEIKYIKNCTNRVILYTLHMKSTKGSLLEDIKAEFAEVNAMMEALEAKEPEDEASEAYDKWIEECEQLAIESESLMTLIDYKMTQGLMEYFDIVDEQGNPTGQTVERKQAHRNNILHRTAHVWIVRRRGNSIQILLQKRCMEKDSFPGCYDISSAGHIPAGVDYIPSALRELREELGLTIEPKQLIDCGLHRHHADEVFHGERFLDNQISKVFLLWLDVDEADITVQKEEIDSVKWFDYAECKQDVIEGTIPNCIDVAELEMLEPHFVEMANKGKYYMTTAIAYTSGKPHIGNTYEIILADAIARYKRAEGYDVYFQTGTDEHGQKIQEKAEAAGISPNEYVDQISGEVKRIWDLVNSSYDNFVRTTDEDHEKCVKKIFKKLYDQGDIYKGSYEGLYCTPCESFWTESQLVDGKCPDCGREVQPAKEEAYFFKMSKYADRLIDYINTHPDFIQPVSRKNEMMNNFLLPGLQDLCVSRTSFSWGIPVDFDPKHVVYVWLDALTNYITKIGYDPDGSSELFKKNWPADLHLIGKDIVRFHTIYWPIFLMALDLPLPKQVFGHPWLLQGGDKMSKSKGNVIYADDMVRLFGVDATRYFVLHEMPFENDGIITWDLVIERFNSDLANILGNLVNRTVSMSNKYFDGIVKSTGATGDADQTAIDADLKAVVTGTRDKVAKKMEGLRVADAITEVFALFRRCNKYIDETTPWVLAKDEAQQDRLAEVLYNLTESITIGASLLHSFLPETAEKIVAQLNTTLRDFDDLDQFGLYESGTKVTDKPEILFGRLKAEDVMPEVEKIQAVQKAEFEAEQAKLAAVEGKAACGCGAGENAADGADLEPMDVEAKEEITFDDFEKLQFQVGEIVKCEAVAKSKKLLCSQVKIGNQTKQIVSGIRKYYSPEEMVGKKVMVLVNLKPAKLAGVLSEGMLLCAEDAEGNLALLTPEKPMPAGAPIEMENFINNAPFIVVLLCLIVGFVFLVKGADLFVEGSSSVAKRFKVPSLIIGLTIVAMGTSLPETAVSVAASIAHNNTLAVSNVTGSNIFNLMVVIGVCALMTPVVVDGASLKRDFPFSMICAILLLVMGTIGMTLGRVDGIILLGCFAGYIFYLIRHTLKQNRQSSDEEVDEIPLISMPKAVIFILIGAVGIAVGGDVVVDSASRIAIDLGMSQTLVGLTIVSIGTSLPELVTSIVAARKNEVDMALGNAVGSCIFNILMVLGIASAISPIAFIQENIIDIIVLVVFSLIVWIMAWTKREIKRGEGIVMLLMYAAYTAYIIIRMVLFIEILLIGVGLSMDAFAVSICKGLGMTNVNRKQALTIGLYFGGFQALMPFIGYMLGIRFEKYITSIDHWIAFILLGFIGGKMVYEAVKEKDDDAVVEKDLALNQGEMLLLAIATSIDALAVGIMFAFTYDSLNIYWAIAIIGLTTFVLSIIGVIVGNFFGNKYKKKSEIAGGIILILIGVKILLEHLGIISFMLNISSDVIRGYNDTIILYLLLDRPSYGYEISKQIRLISEEKYVIKETTLYSAFTRLEKNGYITSFSSSDNASGKRRTYYQITDAGREYYRMKCEEWKLTLDVVSKFIRFMETIKNYLENMFSHLPNTPEVQKAKYELYQMMEDKYNELISEGKSDNEAIGIVISEFGNLDELADSLGIKSFVDPSQAMPAAKTLSRETAAAFLRDSAKQAYLTAFGVLLCILASLGPIFSECIPRSLASPDASDAIGITFLFLCVAVAVGFFIFSGSLSSKWSYLKKEPYCIDFETANWVIERKESYRSTHAMLLTVGIMLCILCAVPAIIISSLNTKSTFADSLSGGLVLVFIAIGVFMIVFTNMKKSSFDKLLSLNGAQTMGGNFANSHDGKVHYENPVVAAIMSVYWSTVTCIYLCWSFITFDWGITWIIWPIAAIINSLVENLLGDKHGNMKKNIYLIIITIITVVCIIAGSLYHIGGFALDLFDNLIPRSDKSLGNVCTEELSVDEFSNLVFDTTISNINVKTGDSYMVSYKCNKRLVPKIKSSGDTLTISQSKGTNYRRSTTSEITVTIPEGAALNKLSFDTGVGEVNLNSLTAADAEFDTGIGDLYVTDCSFTTCDVDGGTGNLSFENCAFDEMDIDGGTGNITVTSSQSLDGYMMDLDSGTGDITINGNDYDDEYEVNEHAKKHLVIDSGLGDIEVRYMDDINKSVKIQSQEARNKDLMTLKFASIKKQAREVRVGTQAASRYYKSMSGTGYMEPQFMDNKKMEEALIKRIMPNSLEAEQSVVGSMIMSKDAIVTASEMLLKEDFYHQQYGIIFETMVELFTEGQPVDLVTLQNRLKEKDVPQEIQSLDFVRTLVTSVPTSANIKYYANIVKENAIKRKLIHVTEDIENECYAGKESLESVLDKTEHDVFELLSTRQTGDYVPIRTVVMNALEKIEKAAQQEGTVTGIPTGFIDLDYRTAGLQPSDLVLVAARPSMGKTAFVLNIAQHVAFHEHLCTAIFSLEMSKEQLVNRLFSLESKVDAQALRTGNLSDADWEKLVEGAGIIGDSELIIDDTPGISISELRSKCRKYKLEHDLKLVIIDYLQLMTGSGRGSESRQQEISDISRSLKALARELSVPVVALSQLSRAVEQRPEHRPMLSDLRESGAIEQDADVVMFIYRDDYYNKDTELKGISEIIIAKQRNGPIGTVNLAWLPEYTKFANLEHMKVILLQDVKPLGKKGEIVNVSDGYARNNIIPKKLGVEATPKNLNDLKLQNQHADKVAQENYESALALARVVENTKVVVKLRSGEGGRTFGSISTKEISAAAKEQHGLELDKKKMQLNESIKALGNYEVPVKLHPKVTANLTVSVVEGMKKKIKFKGRLKSYMCWPLYLTFVWICADGIALRYDRKLGYGMVGFTVFYFAFVLLLYVRSKSVVANELISFATQYSSVQKRLLNEFEVPYALLEYSGKILWVNDKFAELMGVDKSYHKSITTLFPTVTRELLTKSDAPTDFKIVNEEEDSIVRLSVKRIYFNSIAEENEIIDTNEADEFLTALYVFDESELYRCKKEITEQKQVSALVYIDNYDEALDSIEDVKRSLLVALIDRRVNQYFAKYDGLVRKIENDKYFVVFKYKYLDSMKEDKFKVLDEVKAIKVGNEMAVTLSIGIGIKSDKYNENYVYARNAIDLALGRGGDQVVIKDHNDILYFGGKSKQVESKTRVKARVKAQALQEIIETCENVLIMGHSITDVDSLGAGIGIYCAAKNLDKKAQIVINDPTSSVRPLMETFSEAKGYPTDMFINSEEGLEMVSKDTLVMVVDTNRPSYTECPELLRKTEKIVVFDHHRQSSEIIENPILSYIEPYASSACEMVAEVLQYFNDGVKINATEADCIYAGILIDTNNFMTKTGVRTFEAAAFLKRSGAEVTRVRKMLRNDMACYKARAEAVRHAEVYRGSFAISVCPSENVESPTIVGAQAANELLNIIGIKASFVLTEYNDKIYISSRSIDEINVQIIMEKLGGGGHLNVAGAQLEGVTIVQAKRMIQDTLDEMLKEGDIEEMEGLIALAVLLVIVLIVLVNCIKIVPQAHAMVIERLGGYLTTWSVGLHLKVPFIDRIAKKVILKEQVVDFPPQPVITKDNVTMQIDTVVYFQITDPKLYAYGVENPIMAIENLTATTLRNIIGDLELDETLTSRETINTKMRATLDVATDPWGIKVNRVELKNIIPPKAIQDAMEKQMKAERERREAILRAEGEKKSTILVAEGNKESVILDAEAEKQAAILRAEAKKEATIQEAAGQAEAILKIQQANADGLRMLKEANPDNAVLQIKSLEAFAKAADGKATKIIIPSEIQGIAGLTKSIAEIAADKTEKMDTYIVFWLAATVVFVLVELMTVGLTSIWFAAGSFVAFIIALLGGNVVVQGIAFILVSVVLLALTKPWAGKYINSRTVKTNVDSLVGERAVLTEDADSMKQTGKAVVNGQEWTVRPQDETQVIRKGELIEVVKISGVKLIVKRVKEAMAYNKSADGSSMKRRPMRRRKKVCVFCGKDNVIDYKDTNKLKRYISERGKILPRRITGNCAKHQRALTVAIKRARHLALMPYVCEMNKVILMGRLTRDAEIRYAQGDNSLAIARFSLAVDRRYSKNAEEQSTDFINCVAFGKIAEFFERFGRKGTKFVVEGRIQTGSYTNKDGQKVYTTDVVVENAEFAESKSAASGNAGGFAPADRPAPSQAAGDGFMNIPDGIDEELPFNMNKYELALVVSAKIEDDARTAVVEKAKEYITRAGGTVTEVEEAGKKRLAYEIQHMTEAFYYFIQFDAEGTVPAEIEQDVRIMDNVLRFLCVRKDEAMDKYAVGDIVKLKKPHPCGSSEWEIMRVGADFRLKCMGCGHQVMVPRKLVEKNDRGLTKKQAMGNNDSSVETFLQWIKASDNIVFFGGAGVSTESGIPDFRSVDGLYNQKYDYPPETILSHTFYRKHPQEFYRFYRDKMLCLDAEPNITHYKLAELEKAGKLKGVVTQNIDGLHQKAGSKNVMELHGSVLRNYCERCLQFVSAEEILHSTGVPKCPKCGGPVKPDVVLYEEGLNQKTLEDAIYYISHADVLIVGGTSLAVYPAAGLIDYYNGNKLVLINKSTTPMDARADLLIQQGLGSVFEQIEVQNIFMKSILIIGMGKFGHHLCADLIKNGNDIMVMDKDEAKVRDLIYDVTKVQIGDCTDPQVVKALGINNFDLIFVCIGTNFQSSLEITSLVKEMGGKYVISKANRDVHAKFLLRNGADEVIYPDRDMAERVAKKYSANHVLDYVALNDDYSIYEINPPEGWVGKSIMENNVRQKYNVNIVTVKEAGKNRVLPLPDYVFKADDAVMVLGLNADVDKLVRKLMNDIKHDIKKRHKNLTEFRYIAVGFFLTILSGAIMLSLPFSSRDGQWTNFLDSLFTATSATCVTGLVVFDTFRHWSIIGQLVILVLIQIGGMGFISIGVAFSMLLHKKIGLRQRDLMQESVNALEIGGIVRLFSVIIRGTFLIEGIGAVLLAIRFIPDFGILRGIYFSVFHSISAFCNAGFDLMGINEEYSSFTKYAADPLVNITIMLLIIIGGIGFTIWNEVRTKKLKFSRYSLHAKIVISTTLILVFGGGLFMYIFEKSNTIAGMDTPGAIFASLFGSVTARTAGFNTVDTAALTQESKLLTIVLMFIGGSPGSTAGGIKTTTMAVMIIYIVSYMRGSNGCNVFGRKISSEVIKKAGMVLIINLVLGLTAVIAILATSNMKMDDVLFEVYSAISTVGMTTGITRDLNTVGRIIIIIMMYCGRIGSMTFVLSFVHRPDKANIELPEEKVIIGMTGTLYLCATPIGNLEDITFRVLRTLKEVDLIAAEDTRNSIKLLNHFEIKTPMTSYHEFNKIDKAYQLVAKLKEGKNIALITDAGTPGISDPGEDIVRICYEEGVPVTSLPGAAACITALTMSGRPTRRFAFEAFLPRDKKERARVIEELKNETRTIIIYEAPHHLIKTVTELYNALGDRELTVCRELTKKHEEKVQTTFSELLERSRTQEPRGEYVLVICGRNVAEIAKEQQESWEAMPLEEHMAHYESQGIDRKEAMKLVAKDRGVSKRDIYRQLLMEALIHSNERLDDLCRKGYRLIQDPKLFCFGIDAVLLSDYAKVKRGERAVDLCTGNGVIPILLEAKNNGEHYSGLELQPKCADLARRSVKYNHLEDKVTIEEGDVCNASELFGRESVEVVTVNPPYMIGQHGIKNADDAMTIARHEVRCTLDDIVRESAKMLKFNGRFYMVHRPFRLAEIFSTMMKYHIEPKRMRLVHPYADREPNMVLIEGLKGGKSRITIEKPLVVYKEPNVYTDEIYEIYGDKPRNNGKMTKIVGIRFRTAGKIYYFDPADFDLDMAMHVIVETARGIEMGTVLIPPKEVDDDKVVSPLKPVIRVATDEDEKTVERNKEKEKEAFAICKEKIIKHGLEMKLVDAEYTFDGNKLLFYFTADGRIDFRELVKDLAAVFRTRIELRQIGVRDETKMMGGIGICGRPLCCHSYMADFVPVSIKMAKEQNLSLNPTKISGVCGRLMCCLKYEQDTYEYLNSRMPSVGEKVKTPEGIIGEVKSVSVLRQLVRVVIDNGEEKELREYTVDDLRLKPRQKKDVKLTEEELRELKDLEDSGDETMEDKSQEKPQRNRGHRDNKNEYRERRDKRDNREKRPYRADIEAAEASANETNEVNAANAGRENKDGYKKPYKGGKNRPNKQKYNRNKDYKNKNYNKEYNKDYNRDKDNGSTDTQMAGFKDIVGNEQIIEHLQNAISMGKVSHAYIINGPQLSGKMMIAEAFARALQCEKEGTDGCGECKSCHQADDHNHPDIIYVSHEKPNNISVDDIRTQLNNDIVIKPYSSKYKIYIVDEAEKMNQQAQNALLKTIEEPPAYAVIMLLTTNADSFLQTIRSRCITLNMKSVKDEVIKAYLMNEKHIPDYQADISAAFAQGIVGKAVKLASSDEFNELKESALSLIKRLDDIDLYELGAAVKQIAEYKLKVQDYFDLIMVWYRDVLYMKATNDVNGLIFKDEVYDIKKQAAKHSYQGIEAILEALEKAKIRINANVNFDLVIELLLMTIKENMGKIFCVMGKSASGKDTIYNKILQDDSLMLSRIIPYTTRPIRDGETQDKDYHFCNEEDVKRLSAQGRIIELREYNTVYGVWKYFTVNDDDIDLRCKSYLTVGTLESYTKIRDYFGSDKVLPIYVEVEDGDRLIRAIHREKGQQVPKYEEMCRRFLADASDFSEEKLHEAGITHRFVNDDMDTVLAEISEYIRQSSMEKELINNSQSNIYPFHMPGHKRRGSDIGAGLDPYAIDITEIDNFDNLHHAEGIIKEAQAEAAALYGAKHAYFLINGSTCGILAAISAATKRGDKVLVARNCHKAVYHALYLRQLHPVFTYPEITRTGLQGQITEAQIRAAFDENPDIKAVVITSPTYDGVVSDVAAIASVAHAHGALLIVDEAHGAHFGFGGGFPQNAIALGADAVIVSLHKTLPAFTQTALLLLGGMREAAVEKFLGIYETSSPSYVLMTGIERCIHYVRDNKETAFAQLRSRLDRFYQKVSGLSHLKVVRKSDFSADEAYDFDESKIIIFTKEAMNGHTLLELLLKKYELQLEMAAGNYVLALASVMDTDEDFDRLADALIEIDSQLEKYKSDFEEFYDILKQEGVVHKFYLPVKMDTTIYQKLPAVMEMYDAYDADNQAVYAFKASGKVSGAFINIYPPGIPLVVPGEIMNDKLIDDVIKAVNSGLEVDGLDFDPGANMWKFVAVLMSDERCALVLEGGAMRGMYTAGVLDCFMDHDISFDAVIGVSAGALFGVNLLSKQRGRVIRYNKRFNSDKNYMGIRPLLREKNIVSTKYAYDTVPRELDPFDDEEYKKSDIPFYAVVTNIRTGKPEYVQIKSVFDQMDVLRASGSMPVVSKPVKLGNEWYLDGAVTDSIPYEHMLDMGYDRVVVVLTKPADYIKKPMPRVFTSVYKKRFPRFYEAFSNRHIMYNYQLEHLKELEKQGIAEVLRPSEHIKISKVEKDPNKLESLYQLGLRDAERLLADKQGTMAVFAMVTTLCARPLMAFADGDDTYWPEGPQINAPCAVVMEVNTGTVLYEKNSHEKHYPASITKILTTYLAILNCKMDEKVTFSKEAVKESSDGSSSIKRDVGEEMTMEQTLYGVMLESANECAYAAAEHTGKKLGGDYSTFIDLMNKEAKELGCTDTHFNNANGLPDENHWTSAYDMGLISCAAYRNDEFRKITGTKTYIIPPTNKHTEDTPLYNHHAMLHPFKSYSQFVNQDCTGGKTGYTSVANSTLVTYAEKDGLTLCVVIMNAQSPDQYADTNTLLNYYFSNFKALSIAENENSAATDNTPDLGVMNEHGMYAKVSENYVVLPNNADFSSVKREAADMKSDNKDALATVRYKYCDHVVGCVDLLKSGAKVDLSYFDENSRQNLESDIIRIKPVYFLWVLVLIAVIILSIFMFRRISDNIYVLKHKWSIKKEQRERFREHKLERKRRRRRDNLKFSGRHKYMRLRNIPGAGEVIDNSPYCIKEPVELKGKWHDFLGNNNPIHIEVGMGKGRFLMDLARLHPEINYIGIERYTSVLLRAVQKMQEDELPNVHFLCIDAATLPDIFDRNEVDRIYLNFSDPWPKDRHARRRLTSSEFLARYDLFLAPDGRIEFKTDNQDLFTFSLEEIESSDKWHLDASTRDLHHDAAMNEGNIMTEYEEKFSAVGNPICKLIASRMVYSNIGSSYSKMGRDKEAQRYFNDARDEYDSSSEKSEECHKSWVMFDYINHAINDRYVALSMMNAVDKYSTDNIADNEMIIAVDDVVKKDYDSAVVRIKKALARLKSTGHVEKYAEYLNILGLVYELENDESKAFECMKVEERLLKYVGYHTTSDEASDKIPSSDREFALAKELESELKELGLSKVVLTDHCYVYGLLPATAGMEHKKAVGFIAHMDTAPDFSGENVKPQLLRHYDGSDVLLRGSGEYLRVSDFPELKALSGRTLITTDGTTLLGADDKAGVAEIMTALEQIIAEGTPHGDIWVGFTPDEEVGKGADLFDLDYFEADFAYTVDGDYEGEVAYENFNAASAEFTIKGVNVHPGEAKDIMVNAALVGCEIAAALPANETPATTEGREGFYHLCDMSGDVASAHLSYIVRDHDKALFAKRLDTLRSLEIEMNKKYGEGTVSLTITHSYENMLSIIMDNMYIIDLAKAAIEENGLEPLSRPVRGGTDGARLSFMGLPCPNLGTGGYGFHGPFEHISVEGMETAVNIIKSIVKHVLMLADAMVVLAALIIFAVVGGIFVNYLRRNQNDIGGGMGKDYMKEHWGIDDDKMETIRFDELELNPKILRGIKDMGFEEATPIQAQGIPAVLSGRDVIGQAQTGTGKTAAFGIPVLESVDASSHKTQVIILSPTRELAIQVADEIRKLAKYMHGVKVLPVYGGQDISRQIKALKGGVQIIIGTPGRLMDHLRRKTIRPDHVKTIVLDEADEMLNMGFREDIETVLEYLPQEHQTVLFSATMPKPILEITRKYQHDAINIKIVKKELTVANIDQYYYDVKRKDKIDVLTRLLDYYNPKLSLVFCNTKKMVDELAYELCGRGYSAEGLHGDMKQVQRDRVMKNFRNGKTDILIATDVAARGIDVDDVEAVFNYDLPQDDEYYVHRIGRTGRAGRCGKAFSFVKGKEVYKLKDIQRYCKTKIYAQPIPSSDDVAKIRAEKIMDQISTIIDEENLTSVIDIIENQINESDYTAMDIAAAFLYQAMGASEISTAESKDDYDFHNTGAEDGMVRLFINVGKKDKIKPGDILGAIAGESGMPGRLVGAIDMYDKYTFVEVPAEYGKEVLNAMKNAKIKGRSVNMEPANSRMNQTETIDYKHGTTYAITVTALMTAVTCILAPLSIPIGPVPISLTNLAIYISLYLLGWKRGTISYLIYLLIGLVGIPVFSGFTGGPAKLAGPTGGYIIGFIAMAIIAGLVIDHFHQPWLQLIGMIVGTIICYVLGTAWFCFEAKSTVSGALSICVLPFIPGDLIKMIIAMLIGPAIKKRLRMSQIILASASPRRKELLEQIGAEFVVCPAKGEEIITEEEPSAVVMELSRQKAEEVASGVLTYNEQHAELVTPQDILVIGADTVVAYENQILGKPKDEEDARRMLLMLSGKTHSVYTGVTFVFIDKDGRTGEHCFYEKTDVSMHTLTEEEIDRYISSGDPMDKAGSYGIQGRFAIHIKGIHGDYNNVVGLPVARLYQELKKLGVDVMTFYQELQLNQAGSKSLLKNSKTMKEKLYHTFVYMVKIAVTMVFCFAFVTASSIILGKDNSIVGVVVLLCVMVFRNADLGIHTGHSTWLLALFFVIMTVCPHLANQLSPLPALLINIAALAVLILFGCHNPFMFNQSTLVLGYLLLYGYDVSGKSYMLRIAGMAAGAVLTCLVFYRNHKNRVFKRNMKAVIQEFDLFSSRTKWQLCQILCVPLVLCIAQLCNMPRAMWAGIAAMSAILPFMEDMQYRVRKRIVGNIAGVICFTALYFLLPPSIYAYIGIIGGIGVGLSAQYGWQAVFNTFGALAIAAESYGLKGAVSLRVIQNVFGVVFALVFCAVFYRIMSVKVSVKEKALMEHKKKKELRIRSCLIGAIWLALAFSMLISALLFAFLNHFLDLPGKIPGLGWLLIFNTLIAGLITSFINARLLEPITRLSKAMKAVSQGDFEQHLETNSRIAEIGESYQSFNVMTKELRATEMLQMDFVSNVSHEFKTPINAIEGYTMLLQGDELSQEQEGYVEKILFNTQRLSGLVGNILLLSRLENQNIPMKKNNYRLDEQIRQAFLALEDKWTEKGIGFQVEMEEVRYVGNEGLFMHIWMNLLDNAIKFSPENGTITMFLRHENDSVQFILEDEGPGIADDAKARIFDKFYQVDGSHKAEGNGLGLALVKRIVDIAGGTIKAENREYGGCRFVVELPINNHKMFKILIVEDDKELSLLFQKVLEKSGYQVKRASDGAQALEVLDREYIDLIISDIMMPVMDGYELVSELRSAGYQIPVLMITAKSSFDDMRQGFLSGSDDYMVKPVNVNEMVLRVGALLRRAQILNEHKIVIGSTEFDYDAMTVVTGDETLVLPKKEFLLLYKLAASPGRTFTKQQLMDEVWGYETEADPHTIEVHIGRIRERFKGNPDFEIVTMRGLGYKVVKKMKRHKICKIILAILSVFLCVAFYELIGICITYKKQPAVSDAIIKETQNIMSVAGRENTERAVIIEKNSQALLERVRLIQNAKAEIILSTFAFKSDESGKLILGALHDAADRGVHVRILVDGMESWIDMEGNPYFYGLSSHENVEIKLYNKANPLKPWKTMGRMHDKYLIADGKIYILGGRNTYNYFLGDFPGHKNFDRDVLVVCDEPQKDNSVNQLWNYFETIWEQEDCRYFHNSKKLADRQSVKKAVLELQEGYQQYFEVNKEKICDTDYADETFETEKITLLSNPIHTQAKEPVVWYQLGELMKNAKERVKIHTPYIICNDMMYNTWEEIAQKVPDFSIMTNSVANNGNPFGAADYAKNRNRILETGIDIWEYEGGYSYHGKSILIDDDLSVIGSFNMDMRSTYLDTELMLVIRSKEINKQLEDGMMEYESVSRQVLDDGTYYDPYHVKPIELTEKHKRKVFLVQHLLGWARDLFMEYSAIFHDMDKRFCYAIDKDLFVIRVQVKKDDMKEVILHYEDKYIPMERKDTRMTLPMKKVATSQFHDYYEAQLRMNLICLRYFFEFTDMQGEKVYYGNYEFDKECITNRDRMFDCPQNLREEEMFEVPQWAANKVVYQIFPSRFATTQPVDKKLWYKAPITPMDDLHGNLRGIIEHLDYIKNLGIDVVYLTPIFKSNSCHKYDTIDYYQVDPSFGTTEDLKELVQKSHERGMKVVLDAVYNHTGREFFAFQDILEKGEKSKYLDWYFIDELPPRGEWGEIPNFKCFGYYGGMPKLNLKNPEVEKYITDVACYWIKECDIDGWRLDVGDEISHFFWKNFRKAIKAVKKDMLIIGEIWHYAGDFLEGDEWDTVMNYPFYLNLIDLLADEKINVSQFVQNLGYLKGRLNKKCYPLMWNLIDSHDTARFLHLCNDNKKKQHLAAAFQLLLPGMPMVYYGDEYAMPGANDPDCRRGMYWDEEYQDKEMYNWYKKLMQVRKTHACIVEGEMIETIANDDEDTIVMIRKNGEETIAMLFNCGNSAKEFNEYAEKYNLLTDSAFDGKVEGLDAAVIVLMNDKRKIIAIFIIVAIVAALAAVATFFVIKSSKNEAKGSSQMTETATEDSSDKDDPQHTGDNAGSMSVTSDDGASADETQILSASSVAENSNLTFGIDVSKYQGTIKWDKVAAGGIDFAMIRVGYRTQKTGEMCVDTNARYNMQEAQKNGIKVGVYFFSSAVNETEAIEEADWVADYISKYQITYPVAFDCEGFTDSASRQYGMSSEARTKVAEAFLQEIYNKGYTPMFYAAMNELSANSQWDTKTLESRYKIWVSQYPDTAYPETPQSSYEGTHAMWQYTNKGKVSGIDKPVDLNVAYFGFDETESAKNGDAADNATADPEANMKFSDVNETVTAKESVNLRDIPSQGNDSTIKATLNNGDTAARTGISDSGWSRIEYNGQTYYAISSYLTTDMNYVVPGQDGSGSGDGLKTKFKDCNDTVTAKIEVNLRALPSVTNPDATVIATIKNGETVTRTGINEEFGWSRVEYNGQTLYCVTSYLSVQMYKQPVSMQQNISYNPVFFKYFSLFITFQNPFSEKKIRYTPIVMENNKLSTGLTVWLWIIFVLNILATIGGIVVALGASVVGATLGLGATYVVLCFISVILQIIITVSIGILLFAHKKIGLVLIFALAALGFIVSMVTYAIAAQLSAGNIVKAIISAILMPAITYLLAKNDIANGTIAMKKLFVKYVSQNILGMVGMSLYILADTFFISKAVGSNGITALNLVLPVYNLIFAIGAMIGVGSAIRYVVEKNKGDTSSESYFFHALLWCVMISVIFILIGIFIPDRLVGLLGGDSAIINTGKNYTRIFMLFTPFFMCNYVCNAFVRNDGAPSIAMCATLFSSLFNIVFDYILMFPLGLGMEGAALATAISPIIGILICCIHFCSDKCSVKLKPTVPSVKRLFYSCQVGVSSFVAEISSGVITIVFNMIILRLAGNIGVAAYGVVANTSLVAVALFNGIAQGSQPLISDYYGRGLRKNVGSILRMAVVSSLLIAALLILFICTFAPFVTSVFNSEHDARLASYAESGLRLYFTGFIFAGINIVGSAILSAVESVKYAFAASIMRGFIAISIFAFALSAAFGMTGVWLAFPAAEFVTMFIIVNGLRQLKLMAKIERVINRDFDQLLSTIEDGIINGSVSASLEDASDFRSQDARCSVRVFERFSYTGGNRVSLNVTLFQNGEAPVHLSAITAGGSQAVFFKLNTFGEEAFLDKLIELLDMFCFQCEQTAGCTGCTGNIGVCGKKADTAQLQDELTGALIGLARAVDDTSAVSKKTWQTIIEGLFTTITNVSFDNATIEDMIQKVRAEKASLVGDCNKCQSPCGRTDEYDMQQLWNADEDIRSLKSLILFGIRGMAAYAYHAYVLNFEDPEVNHFFCEALFKIGYAESMDELLPTVLKVGKINLKCMALLDKANTQTYGTPEPTDVTLTVEKGPFIVVTGHDLKDLQLLLEQTNGKGINIYTHGEMLPTHAYPLLKKFPHLKGNFGTAWQNQQKEFDHIPAPILYTTNCLMPPKSSYIDRVFTTEVVAFPGTVHIDEQKDFTPVIEKALELGGYKEDQTFTGINGGTQVTTGFGHSAILSHADTVIEAVKSGAIRHFFLVAGCDGAKPGRNYYTEFVKQTPSDSIVLTLACGKFRFNDLNLGEIGGLPRLMDMGQCNDAYGAIQVAIALADAFGCSVNELPLSFVLSWYEQKAVCILLTLLHLGIKNIRLGPSLPAFLSPNILNFLVENYGIAPITTPEEDLKVLLKQMRKVNSMREVTIAAIQMSCSRDVKENIEKAAKLIRAAAEAGAQIILPSELFERQYFCQERRYDYYDYAKPLSENDAVQSMKALAKELGVVIPVSFYEAGEGRQLFNSVAVIDADGEVLGIYRKTHIPDDHYYQEKFYFTPGNTGFKAFKTRYATIGVGICWDQWFPETARGMALKGAEILFYPTAIGSEPILECDSMPHWRRCMTGHAACNLMPVVAANRIGTEEVVPCAENGNQSSALTFYGSSFITDATGEVVEQMDRVSEGFILHSFDLDELESERKSWGLFRDRRPEMYGEKMKILNAGCPRADGFYMPAEYAPHKGTIIIWPKRPGSWIYGARRAREAFAEVICAISESEQVYVLAEADVIDNARSVVEAVRKQKNYQENFPVKYIQMESDDAWARDVGPTFVKNEDGAVRGIDWCFNAWGGKVDGLYADWTKDDRVAALFCNKAGYDMYDAHPFVLEGGAIHTDGEKTVIVTESCLLSKGRNPELSKSEIEQKLKDYLGAEKIIWIPYGIYNDETNEHVDNVCAFTSPGHVVLAWTDDMDDPQYQMSSADLEILENETDARGRKIEVHKVYIPKNPVCITEYELSGFTFEEGEDEREAGERLAASYVNFYITNGGVLIPQFGDVMDEPALKAIGSLFEGRKVYPIYARDIIVGGGNIHCITQQIPQMKINELRTPCYVIDEGKLTENLLILNGVMQRTGARILLAQKAFSAFYEYPLIGRYLSGTTASGLFEARLAHEEMGKENHVFCPAFFPQEMDELIEICDHIVFNSVSQYLLHRDKIEKADKKISVGLRINPECSTQEGHEIYDPCAPGSRLGITREALDKAIKNGLDLSRIEGFHFHTLCEQDSDALEMTLAAVEEKFGDLLYGLKWLNMGGGHHITRADYDIERLEKCIMHMRDKYDLEIYLEPGEAVALDAGYLETTVLDIVENNGIKILILDTSAACHMPDVLEMPYRPPLMDSGEPGEKKYTYRLSSCTCLAGDVIGDYSFDREIKTGDRLCFCDMAIYSMVKNNTFNGMPLPDIAVMDENNDCKVIRRFEYEDFKCRLSMSRLLIIGCGGVAQVAIRKCCQNSEVFTEIMIASRTKSKCDNLKAKLEGKTSTKIETAKVDADNVEELKELINAYKPDAVLNVALPYQDLTIMDACLACGVDYIDTANYECEDTEDPKWRAIYEKRCKELGFTAYFDYSWQWAYQEKFKEAGLTAILGSGFDPGVTSVYSAYALKHYFDEIHTIDILDCNGGDHGYPFATNFNPEINLREVSANGSYWTDGHWVETKPMEWRAQYNFDQVGEKDMYLLHHEEIESLAKNIPGIKRIRFFMTFGQSYLTHMKCLEDVGMLRTDPIMVDGKEIVPIQVLKELLPDPASLGPRTVGKTNIGCIFTGVKDGKEKSIYIYNVCDHQECYKEVESQAISYTTGVPAMIGAMMVVKGLWKKPGVFNLEEMDPDPYMEALNKFGLPWQVVENPVPVDCYKTEDESVHMDMQMWFSQYHTANVKLDVRIQEQLFSGQSDYQKIDVFKSYEFGKMVALDGEIVFSDTDEFIYDEMVTHVPMAVHPNAKRILIIGGGDGGVAKELIKYPSVEHIDVVETDKMFVDVCRRFFPEVACGLEDERISMFYDDGLRFLRRKHDEYDLIINDSTDPLGHTEGLFTKEFYGSCYKALKDDGIMVYQHGSPFYDEDELECRKMHRKVYKSFPISRVYQAHIPTCPSGYWLFGFASKKYHPLYDLDAKRWDALGLKTWYYTTHLHRGAFMLPKYVEDLLEEEETMMDIKRQERAPIYEALEEFKKKRVVPFDVPGHKRGRGNPELVHLLGEKCVGLDVNSMKPLDNLCHPVSVIREAEELAADAFGAANAFLMVGGTTSAVQAMILSTCKAGDKIILPRNVHKSALNALVLCGAIPVYVNPQMNAKLGISLGMEIDQVARAIEENPDAKAVLVNNPTYYGICSDLKSIVALAHSKGIKVLTDEAHGTHLYFGKGLPISGMAAGADMSAVSMHKSGGSLTQSSILLTGRDVNADYVRQIINLTQTTSASYLLLSSLDISRRNLALRGEESFAKVAQMSEYARQEINSIGGYYAYGRDLVNGSSIYDYDVTKLSIYTLDIGLAGIEVYDLLRDEYDIQIEFGDICNILAYISIGDRIQDIERLVGALEDIKRLYSKDKTGLLSGEYINPKVAVSPQEAFYSQKKSVRIMDAVGAVSGEFVMCYPPGIPILAPGELITKEIAQYIVYAKEKGCSMQGTEDPAVEYLKVLEQMWSVPAKNMKKINMSISFVYDVSIQDNCENAVFTFLPFYKQNITFFIFLTYHCCVVDFGYSEGESLSYCTCRITFSTIQPQLLFNCDGIKHSTKNMGLNTALRISDLLRLKWDNVYNYTCRYQPISRTQAYRIVKTAAGKTVQDERDEIYLELELMSKDEYLITDAPLKALTVFAMPMILGSFFQQVYNMADSIIVGQFVGSSALAAVGACAALTNVFICIALGAGVGAGVLVSRYFGARDYGKMKTIVSTSLISFLVLSVLLGFFGFFFSHSMMSLLQTPADILDEAVLYLRVYFVGFPFLFMYNILSTMFTSIGESRIPLGLLIFSSVLNIFMDLWMVAGLDLGVFGAALATLIAQGISAVFSLLIFFSRMRRYKSRFEWFDRHELHSMLRIAVPSVLQQSTVSIGMMIVQAVVNPFGTQALAGYSATMRVENVFSLIFVSIGNAVSPFVSQNLGAKKTERIKKGYHAALVLDLCFAVLAFIVIETLHTQISSLFLGKDGTALAYQVSGDYMRWLGFFFIFMGIKMATDGVLRGLGIMRPFLAANMVNLAIRLSVALICAPRFGIAFVWLAVPAGWFANFLISYVALRKSWPAEMFALEGKHKKWKNVDKECYIVICLSIGYTIAMLMPSIFGENLFNDDWMDFSFPDVDKALYGKHAKNVMKTDVKETDNSYEVDIDLPGFKKDEIEAKLENGYLTISAAKGLDKEEKEEKDGKYIRKERYSGAMSRSFYVGDELKQEDIKAKYEDGILKLSVPKKEQKKVETTKHIAIEGMVKIISDSTCDLSQEVLKKYDIDIIPLHIVKGDEELEDGPQIDIHALYEWADKNKTTPKTSAPSIETAMNVMRPYIDEGREIICFSISSEMSTSINVIRMAAEELDAEDKVTVIDSRNLSTGIGLLVVEAAVMAADGKSREEIKAGIDELIPKVRASFVVDTLVYLYRGGRCNAVSALIGGALALHPMIVVKDGKMDASRKYRGKIGKVIKNYAKDLEEDLKNAIPDRVFITHSECDAKTVEEVRDYIASLGIFKEIIETRAGGVISSHCGPGTLGVLFIAKMNDTFMKEKPVLPLILSMAMPMVLSMLVNSLYNIIDSFFVAQISEEAMTALSLVYPVQNFINAVGIGFGVGINAVIAFYLGAGDNKKADQAATQGLVLAMIHGVVLTVCGITMMPAFLGMFTSSKTVIELGVHYSVIAFSFTLIIVVGVTFEKIFQAVGNMKTTMISLMCGCIINIALDPVLIFGYGPFPEMGIEGAALATGIGQALTLTIYLVVYFVRPIRVHIRRQYILLSKKMVIKLYSIGIPATLNLALPSLLISALNAILAAYSEVYILVLGIYYKLQTFIYLPANGIVQGMRPLIGYNYGAGENKRVSQIYKIVLCMSGIIMVLGTVICLLIPGQLMGLFTHTEATIQTGKTALRIIGAGFIVSAVSVTSSGALEGLGKGIPSLLISLCRYVVVIIPTAFFLSRLFGAVGVWNAFWITEAITAIISICVYYKAIAQSQLSQPTVKMFGQFVEKRESMQTNNKMAVAPVGKLIWQMSIPPLISMFLQYSYNLIDSAFVARLSENALTAVSLSFPITTLMNATSIWIGVGVNVLIAGYLGQGKQNEANTTVTHGLLLAFGIGALLNLLSLLIMKPYFRAFTNNEEIYQLSLAYMSVCSFMQIPNMVHIAIQKMIQATGNMIAPMWFQIAGVVVNFVFDPLLIFGIGVFPAMGIRGAAVATVAGYLLSMILAFALLLGKKQKVRIKIKEFHIQKWMIARIFALGLPSFIMNALSSFMVTFVNLFLVAYSDTAIAFFGAYFKVQQLVVMTVNGLIQGCLPIMRFNYGAGNRDRLHSAFRYGTALVSGMMILGTLTVNFFPAQLLELFTASKAMRSFGISAMRIMAASYLFCGLSTMISTYFQATEKVGSSIAIQLCRQQLFLVPALWCLDKLFQLNGIWFAFPVAETATMLIALIIMAWYRHKNILMITIDVNMTDTTKNWRIRHGAFDRDTLIAIPVILATMLKNKGYEVDFSLPWGLPHSGDYDLEELFAWIDKLAKMEIGNENWGPDYEKRYNMIYKKVKELYPQIKTIANEHVEKNGCPAECVDEHFYNTTEFFAERVNYYDDYDRKGPKIFVGEVAVNEGNYMGQLYAALGEAAFLMGIEKNQDIVTLASYAPLFENVNYRAWYPNLIRFNNHQSLGIPTYYVWKMFGENRGEYVVRSEDEGGRVYRLRTGMASLKSNKELRFRNPIWNGEEAKITHELMGHVQDTEDGRLLQLPDEEQKKEFHSILEWADETKSFVVFGEEDQTYGRFETDIFVEENAYFELGIFSARVVRSYYEEQIVITAGVEKEWDAALVRPFLWKVNGGQCSLEEFGFMHDNKLTEDFAISVKPGEYHRFGYETDGKQIRLYVDGELQKEISIPYGPAFVSVVTDTKDEIIIKAVNFAGDVDPVSITLDCQVQSDYTVTLLSGEKGDENSFEEPEKVKNITVNMHGASSEFVYEAPPYSVSVLRLKKCEAFMDLTNLRQHHEELVNHMKNSGYSMSCIYMYKRQIREILDLDLESWTSYQDIYQYFVSISSNQKDLKWRRSVIGSIEYFDIYGLFPDRRRICSFIEPRGAYHSLNHVYQQLIDYYKTYAERIGKTKDTTIDSESHSGSVFFYHLQQRGCCNLESTEEDDVLSYFLDESGNLIRSAACCKSVRAVLKAGSEVDPIGCKKVLLFLPHLTEHRKNIQMLTDDEICKINQLLDTDTLSLRDKAIINLLLHTGIRGVDIINLKLQSIDWNSDVIRLIQSKTKKELELPLLPSVGNALYDYITIERPKCSFDAVFISAVVPYEPLKVQTIRWIVRKVFGLANIRMNKGDRIGTHLFRHHLTVKLLEKDTALPVISNILGHTSPKSVDPYLHTDFHHLKECALSIESYPVRKGVFDIDMTEFISKLSPLMEQFKKYRKASQKWSRDSHYKMRAFDRHCNELYPENDKLTQEMVDSFFVKRPTETINSCRQRCYLVSEFIKYLQEREQTNVIVPERPRKRRNTYIPHAFSHEELSDFFEACDNLRYLPNRIDMKIRSMTAPVIFRLLYSTGMRTIEALSLRCEHVDLTEGVISIVGTKGYNEHYIVLHDSMLELMQQFNQKMDCIFPDREYFFVSRDNVRFNSSWLSANFRIIWDSVNSSHATAYDLRHNYAIENINRWTNEGFNFYDKIAYLSKSMGHVTLESTKYYYSIVPNLSSIMMNQTNETFDWIVPEVNTDEEIYMKKSTNQGVCIARHISFFVNDYVSSFLTESEHTIKAYRYTLTLYIMYLDEKRGITINSLSSDCFSRSVIEEWILWLKNDRNCCAATCNNRLACLRVFLKYLGSKEIDYLYLYHDATLIPRLKEPKTKVKGMSKNAVKALMSVPDVTNKTGRRDLALIILLYATACRIDEVLSLKNKQLYLDAEKPYITIIGKGTKIRTIGLLPKAVAHLKKYLAEFHGSAPDPEAYVFYSRNTGIYGKLTQPAIGKMLKKHAACAHEICDEVPKNLHAHQIRHAKASHWLEDGMNIVQISLLLGHEHLQTTMVYLDITNDEKAAALATLDDETCKKVTPKWKNTDGSLLNLCGLSMSKLKIKTKERRFETARDLYGIFFEDINRAGDGGLYPEMLRNRSFEDSVLPEGYIQQEDGIHVKTVSGWLDEFCNGEGLCRWVKGNNISETEIPAWYTHNAKMELELTDTLNEHRDAALRIQFEKDGSLTNTGYCGISVKAGESYSLYLFAKAKEEIGLDVEIEYQGKVLTGNSLVVSGQEYTRYDMKLTAAEDCHEAQLTISCKEGGEILLGFISLMPDNTYMGHGLRTDLVEKLKGMSPKFMRFPGGCIVEGTTPSTAMRFRDTVGPAWERPSKLFLWHYRSTLGLGFHEYLQLCEDLGMEPMYVCNCGMTCQGRKSVLLEGEALDEMVQDTLDAIEYAIGSKESKWGRLRASMGHPEPFKMTYLYPNQNKIQTFVIMAEQISMKKQAFNPYLPSWEYIPDGEPYVFGDRVYVYGSHDYFNGYVFCMGDYVCWSAPVDDLGNWRYEGVIYPKTADPLNPEGKMCLYAPDVTVGPDGRYYLYYVLDKVSVVSVAVCDTPAGKYEFYGYVHYEDGTRLGEKKGDEPQFDPGVLTEGDVTYLYTGFCGKGDKSRTGAMATVLGADMLTIREAPVFVAPGCEYGAGTGFEGHEFFEAPSIRKVGDTYYFVYSSILMHELCYATSKNPTRDFVYGGVIVSNCDLHIDTYKPADMPTAYGANNHGSIVQIGEDWYIFYHRHTNNTWYSRQGCAEKLQIMPDGSIPQVKITSCGLNGGPLEGKGEYPAYLACNLFTDTPSVYVGEGNFPRVMQDGRDGDEEVGYIANITDSTTIGFKYFDCHDIREISIWIRGYADGTFEVKTAWDGEVLATLEVQYTNVWEKYTAPVTIPDGIQALYLTYRGNGNAALRSFELSMTEIEFVGYSAVHPSDFIYDIPNGFTGYLLLLFDSPSELLIDGRLMRTAANSAILYTPGSRIYYRAAGEEYRNDWIRFRSDHSFVKLFPLTNTPFPVTDPEYCHQLFKLLTWESAFFSSESEANITHLLRVLFSKLREGIQNESPGIHDHELVALHKMIYNNPQLPWNINMMAAKLHLSPSHLQTLYHRKFGSSCMDNVIEGRLRRAQDLLEYSEYSIRDISEQCGYNNVEHFCRQFRQHNGCTPGQYRKNASAGSNKRLLTHNTLGGREFEKINRNHPVAESFPMGKKRIYTCSDKILCGLGRMYAGGGKLTEKIPQLDDFDMLQIKNPVLPGFNADPSIIRVDDTYYIANSTFEWFPGVRLHESKDLVHWNLLPSALSTTTLLDMKGNPSSGGIWAPDLSYADGKFWLIYTDVKVTEGPFKDMINYLTTAEDIRGPWSDPIRVNGVGFDASLFHDDDGRKYLVQQTWDHREYHHAFDGITVTEFDTETMKLKPETARTIYAGTDVKLVEGPHLYKINGYYYLFAAQGGTVWTHQEVVARSKTLDALSFETEPGDPFITNFDTPELEIQKQGHGALVETPGGEWYYASLCGRPWHHENESSIDPRGWCPLGRETAIQKVYWDEEGWPRIEGGHGGKVLVDAPKDAILTEAPADHSMHDEFDTPKLHDEWNTLRVPFTEEMGTTGDGRLTLVGKGSLCNKHELSLVAKRWQAFNFDAEVKVKFDPFNYQQMAGLTNFYNDKHWSFAFVTWNEKNGRVIEVAECNRGGYRSFLRDDAIPVPDDVEFVWLRTKVRKQSYSYEYSFDGKNYTEIPGTLDAAVLSDDYVLQSYGGFFTGAFVGMACVDYSGYDQTAEFRSFDYKELDMGTNEKNMTTGSPGKLIITFAIPLMLGNIFQQFYTMADTMIVGQVVGVEALAAVGAGDWLVWLVFGIMTGITQGFSILVAQFYGAREKENLKCAVAKSYIMTALLSVIVLAVSEGAVYHVLLFLQTPDNVIDLTMLYLRLIFAGIPIIAAYNIFAAILRALGNSRSPLIAMTVAALINVGLDLLFVAVFGWGVAGAAVATVIAQGFSALYCLMVLRKIPDIRLEKQDFYRQPAMSLRLLKVATPLAIQNVIISVGGLTVQYVVNGFGFLFVAGFTASNKLYGVLEMAAVSYGYAITTYVGQNLGAKKYQRIRKGVHSGTYMALLTAVVISGVMVLFGRNILSLFVSGEPEQIRQVLDIAYKYLFIMAIFLWVLYLLYVYRSAIQGLGNTLIPLASGIAEFVMRVSVALLLPKLIGEDGIFYAEICAWTSAAVLLFISYMIIIRKYKEMEYRKFDNVIIARIDKGEEILEQLKAIAINENIKLASINALGAINDFTIGVYKIDEKKYYSNSFKGYYEITSLTGTINTMDGEYYAHLHMSVGNEKGEAFGGHLNRAVVSATCEMVITVIDGKVDRVYDEETGLNVFKFANFPFEKEVLKNAGKKDIIATKNIGKTLMIRKLLNGDIDRVADIWLKTNLKAHYFISNQYWKSNYELVKEMMPQSEVYVFEADKMIQGFVGLNDEYIEGIFVSDEMQSCGIGKLLLDYIKDKKVSLRLNVYQKNARAISFYQREGFIIQCEGLDEATGEKEYTMLWKQKMNRMPNGNTVKPGWILLLFVSLCITKCSEAVLQWWKEKYQKIDDMKQPYNTTIYNTALYLRLSRDDELQGESGSIQTQRMMLRQYAAEHGLTVVDEYIDDGWSGTNFERPSFQRMIDDIEDGKINCVVTKDLSRLGRNYILTGQYTEIYFPSKGVRYIAINDNVDTINGESELAPFLNILNEMHARQTSKKVKAAMHTRFANGAHYGAYAPLGYVKDPDKKGHLLIDPETRWIVEKIFDLAVHGRGAASITRILVEEKVPTPGWLNYERYGTFANIYAGAPAEKAYAWTIAQVKSILKEETYIGHSIHNKQSNISFKNKKKVRKPQEEWYRVENTHEAIISEEVFQKVQELIASRRRKRRNGTTQIFAGLIKCADCGWSLAYGENKQNKNPYGYYHCSKNGQGLRQCSMHYIRYDVLYAYVLARLQYWSMLAQKDEDKLLKRLLNASDRERNSAKKKQAAELKKAEKRKAEVDGLFAKMYEDWSAGRITEYNFNMLSEKYQNEQKELETKIRQLHETMEAAVQTAADAEKWIALMKQYVNPVELTAELLNTLIEKITVHEAVKGEDGSREQEVEIYYRFIGKIDMAKSKNESNNKNSGTLLTEKDGTQYFVMGKVRIKVSEHFAQDGKPLDSLLEDVIQHAAAASMKPLGWERTSTTLTDMDMNYLLLYLEENYGLTSEKKVQSAIKIVANENRYHPVRDYLNSLQWDGTERIRYALHHFLGADTDEYTYEALKLFLMGAIRRVFRPGSKFEVMLCLVGGQGAGKSTFFRLLAGRDEWFSDDLKKLDDENVYRKLQGHWIIEMSEMIATANAKSIEEIKSFLSRQKETYKVPYETHPADRLRQCVFGGTTNRQDFLPRDRTGNRRFLPVTVYPERAEVHILDDEAAARAYIEQMWAEAMTVYRSGKYKLSFSMEMNRYLNAHQQDFMQEDTQAGMIYAYLEDYTGDRVCSKQLYEEALGNLNSPADWETRAICEIMNTGIAGGIIQGWVAYKSPKRYKKYGSQKGWERVNQAPPEGDGFQEITEEEARQMELPFMNVFEAVKQSVTTRQAASFYGIRVGRNGMVCCPFHNDRTPSMKVDSRFYCFGCGASGDVIDLAALLHGLGKREAAVRLAEDFGVSYEKSGNAPPDRKRHNRSQPRQKSAEQRFQETERYCFRVLCDYLRLLEHWKTAHAPQPQDAIWHPLFVEALQRISYTEYLLDILLYGEIEEKAALIAAQGKEVLRLEQRISELAAGNAGSGQKDDGHNGTGADTGRNPGNIRGDAERRREEQHPKLPDGVPAMLPPHAPEIYLDRATLWNAVENCEKHPKAQLAYSFDIAMQNELTLEENMELARKFVQEQFVTKGMIADLAFHSPEKEDGGIPNPHFHVMTTMRPLNPDGTWGQKQRREYLLDEDGNRIRDKNGDYMFNAVHTTDWHEPETLEHWREQWAAAVNTKFEEKGLDVRIDHRSYVRQGLDLIPTVHEGANVRQMEAKGIRTEKGELNRWIKATNRLMQDVRKKIKALFVWMAEVKEELSKPQTPSLADLLIAYYNQRNAGAWSNKARTGNLKQFAEAVNYLTENKLLTLEDLQERLSSVSEEFEALSGSMKKKSARIKELQELIREGENYQRLKPVHTELNNIKFKKQREKFETSHDAELRLFYAARRILKEELDGKSIALKAWKQEYAQLKTEYAELSPQHKPLREEVIRLRQVQNAVDTALRRREQPQEVQRKKHEMELMGRQHDFRSDHAALFGVVADFSIVAAVKTLPGSIGCAGNGALTGAALDLCDMEKSLEQLKQEYEKTTVLLEQEKRKMQRLKNRQAYLESGSRKQRTHRLITRGAAIESIAPQTKELSEAEFYSLMESILNLPQAEHFIRSATENHARISGQEKGGDMARMSNKRRLEWSFFLNDRSRITYNELCRKCQHECKQSFRAVVVDCPKYLSKRSKKKDKTAGNGKIPMNDKKRLNSYEDLPLVLDVADIQRIMGISRASAYELVHTPGFPAFRRGRLIKVSKIAFFEWMAKGSETVPGSDKMENQFIRHEPCFERILFVLTLDRKKMKERILIGEEQQIRFRLNGSQNAEVLCDMTRPLGTFLINFERDTDRDWNLYGLSPLRQALHSNRWKQPELEQAASEFLWEKYLSNDPLKMYVAFRIWNSYLLAREPRDRNAACDRFMDKMSRLTGVFQNETMSFDRETGKPKQFQAGSLYFKGAPSEDTRLDLWFPDNRRTEECVSAYASLYPLITYYLNRLNDWGLCFRRCKVCGKYFLAKSQRYELCSDKCRKAQALQNKREFDERSRENNYDLLYKNECQNWRNKINRVKNTAGFPADRLEKIQASFSDFRKEALQRKKAVKTGTASPKEFTDWLYQQSNVIVELTEIMTWPFENDTSAITKKLAKKSLQSEKRRNLMVVIAVALAAFLICFTGIVATSLTQMQRNQVVDTYEAVWLGVEENDIETLKGLPEFERVGGYYMLGEELSEQGYHASYVYCDAQMMEIAKAQMNLLEGRVPEKANEVVVSEYFLSTYGNNAKIGDSVTLDTESFHGDYVVTGIMDSVNEKEANTCAIILSKAALTEWKGFDPAGYRAYVHFKNSDQLVEELITSYCREIAEEYQLPNPSMNNKYFAYASKSFDFLPIVGVIVIVLIGGYIVIQSIFRISINDKIRSYGQLRTIGATPKQIKRIVKREGRKLGSIGILVGTVLGVCCGFLLFSKGFNAVSYVVMVSLTLISSWIMVSISIRKPVKIAAGISPIEAVRFTPVQKDIRSRKKNIKLNPVSMGIANFKRDRKKTISIIASLSLGGIILLVVSSMVLLRSPEALARQIYPYGDYKIYLHSELAVEEAMAAGNPLNEKLKQEILAIDGVTDVITKRQSLHINYRANGIDEAGWCDILTEQNYSAVEAALIEGTMPADAHSIIIDSHTSNRDNIRVGETVEVTSGKSTIPVTISGVFDNDSIPTDGHGTVPVDSPLEFATEALFHELHPEIASFDYSWNIASDPKKADNVESELKNIVATHTDIALENIDTIIEYEKNINSFVFGSMEVLSWLVFLFGVINLINTTLSNQMSRKQENSVLRSIGLTQKQLCKMNICEGLCYAFFATLATLIVGLPASIFACSKFSVGAFAGKVVPYKFPVLEMGLFILVLFGMELILSVWTIRRQKKQSLIEQMRAMEMSILQTIDLKKYYGTEPNITRALDGVNFSVNDGEFVAVVGTSGSGKSTLLHMMGGLDTPTSGNVIVRDKELSKMNDEQLTIFRRRNIGFIFQNYNLVPILNVYENIVLPVELDGDTVDQKFLDEIVHLLGLEDKLKNMPNNLSGGQQQRVAIARALITKPAIVLADEPTGNLDSKTSAEVLGLIKRTSAEFRQTVVMITHNNDIARLADRIVRIEDGKIVEMELTPTLILNLALLIVPPVALVLVFRQWLARHIRWTVALTALCDVLLFWDELFYYESFGLFAVLILVQLAATGAAAFHIYNKQRKDMTWPFENDTSVIVKKLAKRNVSSNRIFCFFNVLTIALAISLIVGISLFQQGSKISEQKILNQMQQATIGGLTAEQIEVLKKEPDLEDIVPYKHSDSFLMDGIKFEAVYMPTGFGIIKSYELVSGTCPEQYNEIVIDKNVQLELGYQLNIGDTITLPTAGSKTEDFIITGFTDNVETGTFYFYVSPAYAEQGVLLSDIPYSALIRVNGATEMGLIDFENTVYRLALSQDISRNQLYFNSKFCSSLISGSGMGGVLLATLFIAFSSGIVIYSVFYLSVSNQVSQIGQLKTIGMTEKQIKRMIRKEGYRFCLFGIPAGITVGIIFAYLLEPNGITIINAIATSIFAIILGIIIVQISVYKPAQIASNISPIEATKYVGNDPELKESRVCNRKNHIRLSPYSLAVLSEKQNRKKHNLTIASLAIGGILFMVGATFISSWNPDSFARMGNLEDGEYYITINHNTLVNPKPYGISEYQVDTPFSQELMEELQQIPEVKEIYATERTAAIIEYHNEQLEIPIIPITPDNQEEILKTFPVDWTYETLVEQDAMVILGTSVQKEVYHTCPSIGEKVTLRWFDGTEHSIDVLIAGTSEKSMNEGFYLPKETIEKLWGDMDLTASLTLSVPEYEKVGKSVESKLNKILSRHPDLVMETLQEVKASSANTIHNTSVQVYGVSAFVIMFSIFNLTNTLISRISTRRKEFGILESIGMTKKQIKKMLLHESVLLIIPCLIITVVAGTLMGYLLVRILSANGLTYFQYAFPFIPLLIYGVCLIITPIIISAICLKIQCRNSLVERIKMANMKKINFCKATTIILIINVILSIVLFFVVPDKIAIQWVGTSPSNAVDSYYVFLVPVLSVLFAFTGKPIFTMFLFRLWNRTNEHLVTYLNLCLQVVFLTCEIYIGLYNLCNFNVAISIILIVELMIDVVIGLKLFHNQSIMKFQNLSVKRLFGRVAIGLALSMSGITIALFLVTKQIAVLLTGGTLLLCALVGIFVLTQAFGKRLSQFTADLCQTLDHMIAGNEAPQRPEDSETQLARIGHRLARLYQIMQENRRRVDEERQELQTLVSDISHQVKTPVSNLKMATDTLLEKPMTKAERTDFIRGIRSQTDKLDFLFQALVKTSRLETGVIQLDKKPGRLFDTVAQAMSGIVYAAEKKEIVVSVDCPEDLTVFHDSKWTSEALFNLLDNAVKYTPAGGKIAVSVVLWEMYVEIKVADTGKGISESNQAAIFRRFYREEEVHEQQGVGIGLYLAREIVTRQGGYIKVVSEPGKGSEFSIMLPTKMEQILIVEDDSFLNKMLDYNLTADGYGVTSALNARTAADAIRQREFNLVLLDINLPDGNGFELCKLIKPQHPDTIVIFLTANDQESDQIRGYEVGAVDYITKPFVIGALQRKIKAMFAMLEHHKPAKDIYDDGRLFLDFSEQTASLNGKPLTLSPMEYKMLNLFRKNPRQVLTRGQLLEKLWDIDERFVDEHTLTTSISRIRSKIEADGGAPYIKTVYGMGYQWTGGEAKMNNQFIQRVIFDWNRIDNDSYLKEIEAFKGIEKLDFNKPITFFVGENGSGKSTLLEALAVAHGFNPEGGTKNYVFSTHDTHSELCDAIRIAKGYRKEKWGYFLRAESFYNVATQEEEYADITHPSAKYHEKSHGESFLALAQNNMNPNGLYLFDEPEAALSPQRQLTLLMQIYRCAKEGAQFIIVTHSPILLGIPDADIYCFDNGRIHLCEYEDTESYQVTEMFINNRQMLLDRLLTDMRYFYEIYPDAVICPQVEDELITDANMPTIEEIEAELNEMKKRLVALTLVAAMALGMTACGSKSNNKTTTNDTSDTAVSTAVDWTSYDELVESIRTEADLAKRAEMMHQAEDMLMDTWCVIPLYYYNDQYMLKDYVTDVYSTVEGMKYFYNAKNTKNAGKLNIFMASEPDHIDPALNSTVDGGCLAVNSFEGLMRYNAEGKLEPACAESYEVSEDGLTYTFTMRDGLKWSNGDELTAKDFEWSWRRAADPKTAADYSYLCAVFAGYDDTKGLAADDVVASDDGKTLTVKLKAVTPYFLDLCAFPFFFPVNQKSVEGNDDWANDASDKFVTNGAFTLKEWKHDSSMTYVKNPNYWDADNVTVDEMNVMLTSDDVSAYTAYQNGDLDFIDSIPTAEIEAAKKTSEFYTVDNLGTYYVGFNINSKLYSELGLDADQAKVFRKAICLLIDRQYIIDTIAQGGQKIATTFIPEGVTDGNGGEFKNKDYYGTDYDKNFEEAKELLASIGLLDESTGQVNQTVEFTYLVNNSESNVKIGEAIQADLSKVGINLKVEQQEWNVFLNSRKDGQFDFAREGWLMDYNDPINMLEMFTTKSGNNDMQFGRMSNETNNNEYLLKVDHLKQYFPVHDGFKKMELKAVDDVSFAIKPGETLGLVGESGCGKTTVGRTLLRLYQPTAGRIEFDGNVLFDSEKKIDVNMHPYRKQMQMVFQDPYSSLNPRMTVEDIIGEPLDVHKLYNSKKERHEMIMDLMETVGLNADHATRYAHEFSGGQRQRIGIARALAVDPKFIVCDEPVSALDVSIQAQVVNMFEDLQKERGLSYLFIAHDLLVVQHISDRIAVMYLGHMMELADADELMDNPIHPYTQSLLSAVPIPDPETARHSKRIVLEGDVPSPLRMPSGCPFRSRCKYATEQCAAARPELTDRGNGHMVACFNRMEDNKFVLEVSDLHTTFKTDNGDVSAVNGVSFKLEPGKTLGIVGESGSGKSVTAYSIMQILAENGAITGGSVKYKGEDITKFNKKKMADFRGKCCSIIFQDPMTSLNPVFTVGYQLEEAVLLHTDRTKKEAKERAIEMLTLVGVNEPEKRVNQYPHELSGGMRQRVMIAMALACEPDILIADEPTTALDVTIQAQILELMQSLQEKLGMAIIMVTHDLGVIASMCDEIIVMYGGRVCERGTADAIFYSPAHEYTKGLLRSIPTKTNSKTRLVPIGGTPINMLNMPEGCAFCPRCDAAMKICLTEKPEEIWVGEDHLASCWMNIKNMMEEGKSNEMKDNMKRAPFSTQIDLSKFDMKDFAKASDEEKRQQEVMGESTTFLKDGLKRLRKNPLAMGSIIVLVLLILVILLAPKIVPYGYADIVKGAQNLGPFQYSDAEQAQIDAGEKLFPHIFGTDELGRDYFIRVVYGARVSLGVGVFASLLVLIIGIIYGSVSGFCGGKVDMVMMRIVDIIYSLPDMLLIILLAVVLNEVLTPVIKGTVLSKLGVNMIALFIVFGLLYWVGMARLIRGQILTIKQNEYILAAKCIGTSSARTIRKHILPNCLSVIIITTALQIPSAIFTESYLSFIGLGVSAPMPSLGSLANTARGGLQSYPLRLIFPALTICIIVLTLNLIGDGLRDAFDPKLSKMGKYIVKRVILAIFTIFIISLITFFAMNAIPGGPFNSEKAKSPAVMKELEARYGLDQPLIVQYKNYMAGVLHGDFGVSLKTDRPISDIIGESFPISAKLGLLAALTAIVFGVVLGSIAALMRNRWPDRVIVFFVTLITSMPSFVIATLLLYFFCIKLGVVQAFSSGSNMILLPVLSLSLSPMAYITRLTKTSMLDALGQDYIRTAKAKGVHQYKIIFVHALRNALIPVITYVGPMIGGILTGSMVIESIFNIGGLGSKFVSCITNRDYTMIMATTLFLAVIMVGANLITDIVYKVIDPRIKLDMLTYDDALNLNYYKKTTFTGWMNGMRFLIKREEPVIKEATEDTPEEKGEPIFHAWIWPGPYIFDLTDDSKKTDNTFPFTDDGKKQCVDWINEVISAHSNEYPKNKTNGENLMQDYKDLVKALPGLKEDMPRAFYMLAELFDYGSFDICRSDDKYIIPYIMNDAVECYLTVENAVLKGDYHSEEEIISASLVLGSEKGYGLILHQQDNVVTLWFDNLHVHEACFKYHEIGHFWVKGQEQWRMLVYMVGTIADKYMYMGKEYCNETECFIQSLIYFAPFRRWTPVPGDLMEYHFPARVEGIDIMEELCMEVSDTDYLKLIARYRANPCEKTEKLLSRHLADAKRVPLYQYIYKLVIKASKDYPERNYGNQINERIKEKRKALEKELLQKGYTGKYPVFSKKNTTVRVMEEQPYVTAILEWDDYKYKQQLMISECSSKKYDGINAGFFKGIGRHGRIVQVMIWKILTVILAVSVAVLIAVLVKIRAQLRDINEQLDFLCEKDTNMLLLTDTNMADIGRLKERINRFLEQWHRQREAAAKKEQMISDTYTNLSHDIRTPLTSLDGYFQLLRDETDKSAQEHYIDIIQERITSLKDMLEELFMFTKLKNDSFKLELSNCCVSRLLKQTVFSYYEEWKKQGIEPSLDICEDTIFITANVQALRRVFQNVIKNALVHGQKSICIQMRQQDSCNCRASDDERTSKNRIVHILVSNDVKNPDDIDVDKVFERFYKADEARSISSSGLGLSIAKELVERMGGSIEARLEGKRFVVEIQFECEMFNAVRMDIYRLIHTKSAYVILVIAMALAIAMSGMTALVRSVAAESIVETTDEVTMVSESDSEIADEYDTASAESSNGPTATVGLEMDESDMSDEVPTIADMVESDIAGLDLALLLAIFTVLFSTADLNSGYIKSVGGQVKCRGVLLFSKMIALSVFTFVAMALDVIVQCIATPLFLHGAEFGDAADLFKMLGSQYVVTLLFVYFVMAMAIIIKNNVISMIIAVCMCTGIFTLIFSGINILIEKIGAKNFDINDYLIVNQISELDLSASAKTVGGAFAVAAVWAVVSLIAVYGVFKRRDIMSEILLQTKALTKQYGHQKAVDNVDIHIKKGAIYGFIGRNGAGKTTCMRMIGGLAKPTSGEISMFGYAGKDLSKVRSRVGCLIEAPGVYPNMTAKENIEMKCRLFGISKKGYAEGILDKVGLLNVGKKKTKNFSLGMKQRLGIGMALVGEPDLLVLDEPINGLDPQGIAEVRDTIQNLCAQQDMTVFISSHILEELSKLATDYGIINNGALLQEITREELLSKCSEKITLTVDNPNKAVPVLDKMGFVHYMIVDKNHIDVYERLNDSAALNTALVTAGVSVAQLAVTGMELETYFLSITGGATNVMTDNKSGEILIIEDDKDINDLLATALSKAGYRTRQAWSGTEGELLLKLDREAYALVLLDLMLPGLSGEELLARIRQMDASLPVIILTAKDELDEKINLLVAGADDYITKPFEIKEVVARVAVQLRHAVADVPSKSGKAGENQTKAENDTGQGDTANTYIAGPAKIEHRQLVLDRISRQLYVADNAVDGITKQEFAILELLMAHPRQVFAKEDIFEYAWDEPYIGETKTLDVHISNIRKKIKKLTDDEYIETVWGIGYKMKEMKRFTAILFTGMMIFTLASCGKKAQDTPTEPATETQAAQKVEMPTETEAVTEVVTEDVKDTQQTEAQQEEQTAEQPDEEQNNSGDNNSSYQYVERASYENGESVSLNPSWQYADHSAINSGCAVMYKATANRKNIVVGVNAGHGTSGGTSVKTLCHPDGSAKTTGGTTGAGATKAVAVSGGMSFNDGTPESSVTLRMAQILKDKLLAAGYDVLMVRDGSDVQLDNVARTVICNNAADCHIALHWDGDGLSYDKGCFYISVPGGIKGMEPVASHWQQHDALGASLIEGLRAHGAKINGNGSMAIDLTQTSYSTVPSVDVELGNACSDHSDATLENLADGLVQGVEGYFMEILKLPVGIDNFEKIRRNNFYYIDKTKLVEQALHNWSEVTLFTRPRRFGKTLGMSMLRSFFEIGTDKSLFDGLYISQNKSLCDEHMGKYPVIFISLKDVEGLSYDEAFQVFSRIIGNEISKFSFLAESDKLTVLEKEQFKGLLHIEKGKFIFDKDTFTASLKLLSQLLYKHYGQKVVILIDEYDVPLDKAYQNGYYHEMVSLIRGLFGQVLKTNDYLQFAILTGCLRISKESIFTGLNNFKVLPIMDTRFDEQFGFTDSEVEELLAAYNLDSHFTEIKEWYDGYHFGNADVYCPWDVINYVDLLRFDPTAKPQDFWSNSSGNALVRSFIDKADVQTKDEIERLIAGEYIEKEISQELTYDEIDKSIANLWSVLFTTGYLTKQGVTDDGKVRLSIPNREIKNLFIKKIREWFSDTTANDGKTLEQFCNAFVEKDTEKIEELFGDYLWNTISIRDTAVAKDKKENFYHGILLGLLGYKASWLIKSNTESGTGYSDILVEVPNNRTGIVIELKYAENGDMDAACSEALKQIEEKTYVDKLKRDGMRNFIKYGIACFKKDCKVVVSEMKKIISNLSVVIFVIGCVIMEITTWFIDSYVMFYIGIIIVIVGIIGMIIQGKFKKVIEFIIEYFMVRYRRDKAHRIKLTDDMLEAAGIESNKVRVDVQDGRLVISRIMKNNPFSLSFGKEPVSLINRNVQSYEIIDTFEDENPAYQVCMITGVRGSGKTVMLTEINKTFRAEEDWIVIDLSPERDLLQSFAANLSNYPSLSEVFREAKINLSFLGLGVEIEGVSPITDLNVAVTRMLEKIKKKHKRVLVTIDEAVCNDTMKEFVSLFQIYMRQDLPVFLLMTGLYENIYELQNEKTLTFLYRAPKIGLRPLNIGMIAEKYKSIFELTDEEATEMAKETRGYPFAFQVLGYLCFKHNTGWHNVLPEFSQYLEEYVYEKIWSELSKGDKELLVAMAKTNDTKVEAIRKTIKKASNSFSVYRNRLIKKGLIISPEYGHLEFTLPRFKEFVLCRMYNDKGNTKYLKLLKQNYSSSQDVIREIVNLSAIINLPKGTEFFLSDIHGEYEAFLHIMNNCSGVIKEKVDLIFKDTISDYDRQELCTLIYYPREKMALLDEQGKIDSDWYAMTLNQLILVAKLLSSKYTRSKVRKALPEEYAYIIDELLHAQEDEDANQVRYHKQILKTIIDLEDADEFIIALSALIKRLAVDHLHIVGDVFDRGGSADKILDLLYDYHSLDIEWGNHDILWMGAACGNDACICNVIRNNLKYNNVEILENAYGISLRQLMLFGMKTYGIEDGIEAARAAITVMLFKLEGQLILAHPEYEMGNRLMLDRLDELQDVGVDRKRFPTVDDERPYALSDEEAVIMRKLHRQFVTGQRLQKHVRFLYDKGSMYNVYNGNLLYHGCVPVDSNGAFDKLYIDGEFYHGRALLDKCDEKARAAYVDNPYKDDVDFMWFLWGGEKSPLCGRRLKTFEMEYVTDKSMWEEPSNPYYSRYYDKSFCCQILHEFGLYDDDAHIINGHTPVHAIEGENPVRANGKLFVIDGGFCRAMNKKTGIAGYTLIYNSHGLRLKAHTPFTSVEDALINNTDIETSSEVEENDKRRMLVKDTDIGKRLIGEIDDLHKLLENYRRLMDPITLAQEIIDGRRITRDDDLSFFLTCDLDELCKGADMIREKFIGDKVDLCSIINGRSGKCPEDCKYCAQSAHNHTNCEVYDFLPEEKILEACRMNEREGVDRFSIVTAGKALTGEEFDKAIHAYETMKRECKIDLCASMGFLSAEQLHRLHEAGVSSYHHNIETSKRNFPNICTTHTYDMKIETLKKVKAEGMYACSGGIIGMGETWEDRLDMAVSLAEVGVDSVPLNALMPIAGTPLEGLEHISEPDILRTVSFFRYINPEADIRLGAGRALLTNDGELAFKSGASATITGNMLTTVACATIRSDKEMLEGMGRNVTPEYMKMWVLYAFGSAFFAGITSILAKCGIKKTDSNVATAIRTIVVLIFSWIMVFVVKAQGQITAVSAKTWIFLVLSGVATGASWLCYFKALQLGDVNRVVPIDKSSTILTIILAFIFFKEEINVLRLVCVVLIAIGTYMMITKKEISQEEQNKARGSHGWLFYAVLSAVFASFTSILGKVGIEGINSNLGTAIRTIVVLIMAWIVVFVTGKQHTIKHIEKKELGFICLSGLATGGSWLCYYKALQDGLASVVVPIDKLSIVVSIVFSYFVFKEKLTIKSFTGLVLIIAGTLIMLVMTKIIFATGNKDKLREIKEILSDCDVDIRSMKEAGINVDIVEDGKTFEDNALIKARAIAAHTDAIVLADDSGLEIDYLNKEPGVYSARYMGEDTSYDIKNNNLIERLDGVPKEKRTARFVCAIAAVLPDGKELVTRQTMEGYIGWEIAGANGFGYDPIFYLDEYGCSSAELTPQQKNAISHRGKALRAMKEMLVKVIMKYSKRYIAFTFILALIFVSNFYIYAKDSSTLGAFRGAQIDNTIWSPLVAADVNGTTIRLRIENKEYTSEDEHVYMDENRNIMVPVSMLRDALNSSAHVYNKNELLVEKHSLTADFKLADDNGFVQYKGQFYASLDKLSKLLDMTCSFDTATNTLTMTDKSEGVSTVPTKYDLRERQRVSLIRDQGSYGTCWAFAATSALESALMPEEQLLFSVDHMSMSNSFNVNQYDGGEYTMGMAYLAAWQGPVYDADDPYGDGVTRDDLAAVKHVQQMLIIDGKDYQGIKEAVFKYGGVQTSLYSTISSSRTKNPYYNKQTNSYCYMGQDKPNHDVVIIGWDDNYPKENFNVDLEGDGAFICQNSWGSSFGDNGVFYVSYYDTNVGTHNVVYTDIESADNYDNIYQSDLCGWVGKMGYDKEDMYGANIFTAQSAESLRASGFYATAADTSYKLYVVKNFENEYSFKNKTLVAEGSLKNAGYYTVDFDEPVDLESGERYAIVLYINTPGSTHPMAIEYNSGEAYMSTVNLDDGEGYISYDGVAYINVKEKQDCNLCIKAFSDNRMRISKKVAEIWLKLFKKIEIYATMLDNNVKYNYRKAVTQYMNRFELVVPCHFGLEAVVKREIYDLGYEITRVEDGRVSFEGDAEAICRANIFLRGAERVLLQVGRFKAATFDELFENVKALPWENYIPKDGRFWVKKASSIKSKLFSPSDIQSIVKKAMVERMKKSYHIDWFPEDGAQYPVRVFLYKDEVMVTLDTSGDSLHKRGYRLATSKAPLTETLAASLIMLTPWHADRILVDPFCGSGTFPIEAAMMAANIAPGMNREFTAESWTNIIPRKLWYEAVQEAEDMIDKDVQVDIQGYDIDPDVVAAARENAKRAGVEHMIHFQQRAVADLHHPKKYGFIISNPPYGERLEEKSALPALYSQIGEAYKRLDAWSMYLITSYEDTERYIGRKADKNRKIYNGMIKTYFYQFMGPKPPRRKKDMKFKIVYADELYKVQKEMNALLIDIRTREEYDRSHWKGALSMPMDITDSYESELDVSQSVIFYCTHGGSSMKLARYLGNRGFDTATVIGGYNAMCGYQKKLQKYGMSNRFDDENNIEMDIKTAFASWGKYVFKCFPQECRLRSFLSEDSLDDSEEKNVDIINNPFIDSMVDRNNLLKAVKQIAEGEKFATVVLHAKEGTDTYRISFKSICFDDDGRTVEAIGLAEQLDERLNESEMVNALGSNFNSIYYVDVDNNKMYPYRMNPSVRAMFGEVLESKPGYNEMMEQYVNAIVLEEDKLHMLLETSINNLRRQFLIKDTYQHDYRIVRDGQVQYCRAKFVNVSGVGELHKMIAGFSDISPEKQRELERIAYVDAVTGGNNYESFKKKLRDRNVSGYLISMDIHSFKIVNSICGVAKGDEALRWISENIRGVVGYNDISGHINADRFVIFCADDKINNVIRKIQTINLQLIKVSESLKIPKIQPYFGVTKWESGKKVEEAYSEANFAKNRIKERKDVLYQIYSQADTERIVEEKQMEDNFYRDLNDNRFEIWYQPKYAPKTNKLVGAEGLVRWRRGNNEIIPPSKFIPLFERNGMIKALDEYVFRRVCTHQRRWLDEGKKIVPISINLSRASLYFESVVKRYHDIARKIGIYTHLVPIEITESAAVDNDEIKSIADRFHGKGFPLLVDDFGSGYSSLATLNMKCFDTLKIDKSLIDYIGDSNGERLLVHTIALAKELGICVTAEGVESQEQVEFLKNIDCDSIQGFYYSKPLPLAEYEMLLDMEIEEVVVEIVMGLFLLFLSYQVGIKENITFLHSYHYTHLNPKDKKAFTKRIGIGSLLVSIGVIAMPIINLISHSELGYYIGLTLIVVGVFYIIFIIVKYNGKLISFKKMNEHLILKNRLKEVRKEKKLSQTELAEMVGVSRNTISSIETGQFNPTAKLALVLCIALDKKFEELFYFDMDKEKILSQNKKDNLYLDEYEKHIKLKGKSFGLMFVLLVCILIFVIKVICKEPYNDIMTIIWSVAFGYMSYEAYLSRSKPKFVTALFFVLFMLYYFYKFLTAGLMEHYEKKISFLGENIQTIRKHRGMKQQELADKIGINMQSLSKIERGVNYPTFDTLEKIMDVLGVTPNELLSGEWKYVNQAEKEVCQFLRIEERLNAELKHGHYDNFFDSEEEWLEYELEKLREYITDYINGKSIVASDLYPIKEFIQHLKFQKLLDRYDDLYSMDMFGESIEGHKYRTPYQVVKMINPNSKEDMELLREVLKNNHFDDEDEMDKYSVMTYVLNSKDFAITGGEFGIESSVISLFGYIIVAGIAFFMIKSRKNMIFSPWKGSYLLIFNGKYVSSNMNGNQMFNTLSAGVAFTGIAEMSEKGLTNISVKKINRSKVYQYIYRKKITSKLQIVQDLQMGLSTVSQNLNLLEQDGLIEKNGYFESTGGRKANAIQIVSDFRISIGIGILKNMFHITAVDLYGNTLYTNTIPFPYSNTPDYYKQVTDKIKEFIATNQYDEEKILGVSIATQGITSPDQSTVLYGNIMNNTGMILEDFSRYLPYPCYLEHDSKSAAFLELWKHPELDSAVVFLLNRNLGGAIITNHQIHQGSSMHSGTIEHICINPDGPLCYCGNRGCLETYCSANALEQAAGMNIKDFFSLLREKKSPQLTQIWKDYLHHLAFAMKNINLIIDAPIIISGYLAPYFLEDDIAYLTKHINVSSPFALNKEHIFVGTNGQYTPAIGAALFYVNQFIHAIMKLSLNGIKEQEAWEKAGITLPGYDVEAVSEKAKKEPGWVHFGIGNIFRVFIGGIADGLLEEGVLNRGITCIETFDYDVVDKIYDPYDNLGLSVILHGDGTREYKVIGALAEAVKAQSSDPAHWNRLKEIFTSKSLQMVSFTITEKGYALQKADGTWFPFVEADIKNGPDKATGAMAVLVAMLYERYKAGRYPIALVSMDNCSRNGAKLRESVLTMTEEWKKVGFVDEGFVNYVSDEKIVAFPWTMIDKITPRPSEQIAADLENLGIENMQPVITSKKTYIAPFVNAEKPQYLVIEDNFPNGRPALEKGFGVYMADRNTVNLSERMKVTVCLNPVHSATG

SEQ ID NO: 2 - protein, 866859 aa, Eubacterium rectale (residues 288,954-577,906 of 866,859)
  misc_feature (181184)..(181234): Xaa can be any naturally occurring amino acid
  misc_feature (740872)..(740875): Xaa can be any naturally occurring amino acid
  misc_feature (741890)..(741893): Xaa can be any naturally occurring amino acid
  misc_feature (759161)..(759164): Xaa can be any naturally occurring amino acid
  misc_feature (805597)..(805616): Xaa can be any naturally occurring amino acid
PLGVVLGYDLFAHMLNTNEDMMKMARMIAYDEGLPVVANPGILSPQAFVDELFNERFPNEYLGDTNLRLAVDVSQMVGIRFGETIKAYVAKFGDASRLTAIPLGIAGWLRYMLGVDDEGNKFELAPDPMNEELQEQFKDIVVGKTETFKDQLKPILSNERLFFTDLYKDGVGEKIEEMFREMLAGPGAVRATIHKYVGMDMQMHEIYSEQIAQQLIQKAYIPLQGEVTFEDVKNGYERYFKNPNKGTIVEYAMHITFDKNCEMTQNKCCRHGASLRRRRRRHRKILRFIIFSCGIIAVAVFVAVGSRMITSGDGGTNKNDVEAGNNTYDNAVIENSKISEKNNIQNNQSMLDDIMNSTQYPKQLKDLALKNEEALEFVYDYPAEHVKEHTIDLTEEASMDSVPLFVQWDKRWGYEKYSGNFFAASGCGPTTLSMVVVYLTHNRDASPIAVAKYSKEAGYSVDGSGSSWTLISEGCRHYGVKAKAVALDESRMKAELDEGHPIVVNVGPGDFTDTGHFMVITGYDDEGFSINDPNSIEKSGKRWLFKNISSQIRAVWSMYVMTSILIVEDDNDINNLICNTLKAEGYQCERAFDGKEGADKIEQNRYDLLLLDIMLPEINGYELLDYVRGIGDTPVIIISAMGQVDERIRGLRMGADDYICKPFQIGELLARVETVLRRTQRMAERLEIEDVAIDPKSRTVTKAGEQVELTAKEFDLLYELMKNKNVALSRRRLYELVWQEEYTGETRTLDSHVQRLRKKLDWNQKIVTVFRIGYRLEVRGMKFFYKMFLGMTVILAVALGMIEYVTLSYSLEHAVKREQDSALSQHQMIKYSIETVILNMKSEDVDKELTDMMSQSAKSIVGDEGGMYLADDDGKRIYANSCNYEQKDIKVKDGTLTYSVVLKENTKDTGEKQSSRYIHVKSSFKLNDNRYILITESDITPVFDESKELRYRCSMYYIVIFAVGMMVILILSWMITKPLAGLTATTKKFADGDYTARSDVNTKDEVGELARAFNELAKNLESKVYELQMAAKKQEDFTANFAHELKTPMTSIIGYADTLYQKKLSEDEVHSAAGVILNEGMRLEALSFKLLELITLDKNDFRLEETRVSEIIADCVETAHEAARKHNTEIVYSADETWVWLEYDLFKTMLLNLIDNAVKSGGSKVDVSGRLISHSIYRIAVSDNGRGIPPEDIERITEAFYMVDKSRSRSEHGAGLGLALVSRIAKLHDTKIHYESESGKGTKVYFDMKAEALDEKMRSKHLSVRKCIDKKPDKIKGIVCICIILAVVCAGNMIPNYLISLKAAKIAKTSTTISNADISPYSHSISAEERLTKMMSLMQDNVNELWNGKYSEIREPLDTEIPVGQAYTAIQTFLKGACELQKQSGIMQMLGEDDIVMLQSLESNYSKDTDSETEQTYEAAPWQYGAAVALDDSFDNTISDYFVTSDISKELSAWIFIISFEDTRMLAAVDAVLGVPFYITYYCADVDSPKAQAAVMRDLYAKTYGSDYSMGDPKESESKIDSSFETNIIENFYYGNDYTQGDDEYTGFEPYVYSCSSDKLQMEYQVITRIQRFEKKGKQVSSYNSRVNICLYMNADMKWLDNPEVFKVNQLEPHSDHCYYLDYSDMKKEKNPLLQSLNGQWEFAYSKNVMERPVDFYKETFDASGFDKIMVPGHIELAGYDKIRYINTMYPWEGKEYHRGAYSMETTGAEEGMFSEAQYNPVGSYIKYFDLDKKMCGKRIHICFEGVEEAMYLWLNGQFIGYAEDSFTPSEFDLTPYIKEKGNVLAVQVHKMSTAAFLEDQDFFRFFGIFRNVTLKAIPDVHLEDVWFKPVLNQDNESGSVSVSMKVSATDSQNVTAGFILKDREENILVEKSLQLNKENNHLEGTICVDLESVRLWDNHNPYLYHAYVELKAEDGSLAEVIPYDIGFRRIEIIDKVVYLNGKRLVITGVNRHEWNARTGRCIGIEDMKADISCILRNNINSVRTCHYPDQIPWYYMCDDAGIYVMAETNLESHGSFQKLGAIEPSCNVPGSIPQWRDAVLERAKNNFETFKNHTSILFWSLGNESYAGDDIEAMNVYFAEKKDGRLVHYESAYYNRAYEDTISDFETRMYAKPEDVEEYLNNSPKKPYILCEFMHDMGNSMGGLGSYMKLIDKYDMYHGGFIWDFIDQAIMVKDPVTGKDVLRYGGDFDDKPADYEFSANGIVFADRKEKPAMQEVRYYYGLYRMAYTDKLRVVYGDYTLGVHGEGFDYIFSYAQGGLESIVKNGYEWLYRCPKPTFWRALTDNDRGSKFHIKSGSWLSADMFIDCKGIQVIMDGKEQKPYAPDNNSYGGDVYADEIIVKYTYETITTPATTVLVSYSVDASGKIRVDVHYNGVQGLPEFPVFGMRFIMPTLADKYLYKGLSGETYPDRKAGAQEGVYEIGDLSLTQYLVPQECGMRMDTEWLEITRHTALDNSRTDSSSQTLRIEKNDEKFAFSCLPYTASEIENALHHEELPPARRTVLCIYGAVRGVGGIDSWGTDVEEDYRISAETDKDYSFTICMYINTGYLNHSHKDFKDKSRPLIVGSCGTYRLSQHPKMPTYRPRGRLDYQIIYISSGLVHFHFDNPENETIIPAGHIVLFRPKELQKYEFYGKDKTQIYWLHFTGSDVKNTLRKYGFTDNKRVFNVGTSLEYEQVFKRIITELQRCQDNYEEMLMLLLRHLLIIFNRKITTEHVIRNEFLDSQMDTAITYFNTNYNRAINVEEYASSIGMSISWFIRSFKKYTGSTPIQFITSLRMTNAQVLLETTSYSINEIAGIVGYNNPLYFSRLFHKQKGCSPSEYRARNTMILCIDYVSNGIESNSCETVVFEKYHFVHITAYYVYRQNLHKYIKLVMEEKTYLKWYNKIGYGSGDIAGNVVYAFLTSFVMVYLTDTIGLASGIVGTLIAASKLFDGFTDIFFGSLIDKTHTKLGKARPWMIYGYIGCALTLVAVFAIPTSWGRTAQYAWFFIAYTLLNGVFYTANNIAYSALTSLVTKNSKERVQMGSYRFIFAFSTSLIIQSITVAFVDVCGGGAAAWRVVAIIYALIGLVVNTISGLSVKELPEEELNSGIENDGEKKYGLVQAFKLLVKNKYYMMICGTYILQQLYSAMIGAGIYYCTWVLKNKNLFGVFAWAVNIPLIIALIFTPTLVGKWKGMYKLNKRGYILATIARALVIVAGYMGSVPLMMLFTAVAALGQGPWQGDMNAVIAECSEYTYLTQGKRVDGTMYSCTSLGIKIGGGIGTAIVGWLLEISGYVGTNATQPTSAITMLQVMYLWLPFVFEILITILLSKMNVEAANEKLRREKGIEMHLTYENTNEEIIAVKRKPRHQPPHLHNAMEIVCVTKGTLELGVGQELYHMETGDIGVVFPDVIHHYQVFSSEVNEAVFINAPQMIFGRFENVLRNKAPQYPVVKSDVIPDEVYRAVESIIDTKQNDIWVVQAYLQIILARCIPMMKLVEKSKIGSDDIIYRTVSYISANFNKSISLDGMAHDLGVSKFSLSRLFSKTFHSSFNQYVNEARLGYACQRIETTDDTLTEISMDSGFGSLRTFNRVFKEKYRLTPSEYRNKLQKMTFAEKLQKLRKQNGLSQEQLAEKLNVSRQAVSKWEMGTIPDMENMVKLGRYFDCSLDYLMNDDIDTNAKSHQSPKIENKNLAWKCVATGLIITGLILSLLMPLFAKMYQGFEFSNFHQCFTDSWRYIFKFPLLGILLIALLCLFTGIVLFLMKRYKGTSMKEYSIGTKCVQAGYAAGNGEPRQIPIIQSTTFKYDTSEDMGKLFDLEAEGYFYSRLQNPTCDTVARKIAAMEGGTAAMLTSSGQAANFYAMFNICECGDHIVASSSIYGGTFNLIAVTMAKMGITATFVSPDATEEELNAAFRPNTKLMFGETIANPALTVLDIELFAKVAHEHGVPLIVDNTFPTPVNCRPIEWGADIVTHSTTKYMDGHGATLGGAIVDSGKFDWMAHADKYPGLCTPDDSYHGITYAEKFGKEGAFITKCTAQLMRDFGSMQSPQNAFMLNLGLESLHVRMPKHVENGQAVAEFLENHPKVAYVNYSGLPSNKYYERAQKYLPNGGCGVVSFGLKGGREAASAFMKALRLGAIETHVADARTCCLNPATSTHRQMNDEQLKEAGVPAELIRISLGLEDKVDLIADISNALDAIKMRENTGKVVLVGAGPGDTGLLTLKGEKYIKQADCLVYDRLSSPEFLSMAKAGCELIYVGKENHKHVMKQDAINELLYEKSKYHELVVRLKGGDPYVFGRGGEEALYLVDRNVEVEVVPGVSSSVAALAAAGIPITHRGIAKGFQVITAHSRKDEEADIDYSLLTDETITCVFLMGLAHVKSIAAGLMKAGRRSDTPAAVISNGTLAAQRKCIGTLADIGEKIEEAKLTSPAIIVVGDVVSLNDRLDFFEKRPLFRRKITVPYIKTNGLIAKLQQLGADVTPVKTGIINPIIIPKFADKVRSADWIVFTSKNGVRSFFYNLELAGADIRLIASVRFAVVGKATEKELAKHHIKADIIPAEQTGKGLADAMKLCMPYVYGESDEDIFDLGKKSTLYLSNGNISDKMCKVCIFSAKEASPDLEAGLKEICELEKIDAYVNEQAYESIPESIGNMVSEAVFTSASNVERFFHMLPENAYVETAYSIGEKTTAALEQHNVREILQADDSSYEALVDTICYKAMRYLIGTRGSKLALVQTDYVIDKLKRAYPDDDFKAVIIKTTGDLEQKKALDKIGSKGIFVKEIEDELLSGKIHMAVHSMKDMPDEPAAGLTFAKAWKREDPRDVLVLKNAASLDELPHGAVIGTGSKRRKYQLLKLRPDLKVVGIRGNIDTRLRKLYDGEIIYEEVADNTVNNNEIANEKQNKYSEYRLDGIVLAAAGIKRIGRDSEITQYFSEDDMIPAPAQGTLALELRADNAKLMAKLDALSDEKTNLCAGIEREFLKRIGGNCHLPVAAYCDIVSEKDRGNDSNKNNRLKLLAMFGSEDGKQLARTEQIWDMTSDRNNIVERAVHDIRYKLEIDMAYFPMFVDMTERECLIVGGGNVAYRKVIVMLDFGAKVTVVAEDICDELRKLTIDDIASEDKTGSYTANIENNKTDSDAADRITIIKRKFNQKDCDGMEMVIAATDDNALNHEIAEYCKAKNIMVNAVDQKADCSFIFPSYIKEKNLVAAFSSGGNSPVLTQYLKCKEQEILTPFLGELNEYMGQIREKVIAQYDTEAERRRVFKEMLCAAIDNGRIPEIMKLKTKELTTCALFAALIAVGAFIKIDIPLPMYTMHFTLQWFFVLMAGFLLGAKLASLSVIVYLCIGLVGVPVFAAGGGPTYILRPGFGFLLGFVLAAFLIGAITEKLKKTNAFTLILPATVGLVAYYTVGAIYFYCMKNFYAATPVSWGIVIVDYCLITVAPDFILCVSAAVFSAKLRPVFEGMLNGYSVKHKAKNKAMSIIRMKYPFLDEIAKYAREHLPEEACGLIAGSEDENGRLITKVYYLTNTDHAEDHFTMDPKEQLAAIKDMRANGLKPLGNWHSHPSSPSRPSDEDIKLAYDPSASYMIMSLMAENPVINSFHIEGGQVTKEDLRIYSDEYYFMAMTDEQIERYSRHIILNEVGVKGQKKLLKGKVLIIGAGGLGAPAAMYLAAAGVGTIGIVDADEVDLSNLQRQIIHGTADVGKAKVKSAKETMNAMNPDVQVNTYRMFVDASNIRELIRDYDFIIDGTDNFPAKFLINDACVLEKKPFSHAGIIRFKGQLMTYVPGEGPCYRCVFKNPPPKDAVPTCKQAGVIGAMGGVIGSLQAMEAIKYLIGVGELLTGYLLTYDALTMEFHKIKLPKDTHNCAVCGDHPTILEPIDYEQEVCEETAGRFDAPRTQEMTITVAGEKKEYKDGLTLPELIELENVDMPEYVTVSINEEFVATEDKPKTVLKDGDNVEFLYFMGGGCMAARISKADFDEKVLKSKLPVIVDFYSDSCVACKKLAPVLGDIEDDYEDKLHVYKVNTNFDGELADEYEVTANPTLLFVKNAEVLDRKVGAQKPADLKAWVEELLMADIAFDDQVDITDKVCPLTFVKAKVAIEELDDGEVLAIRMNDGEPVQNVPRSMKEEGHKILKLEDNEDGTYTLYVRKVEDMAEKVDYAALKKGGFMRQKQKGCFSLRIAVVGGNLTAENIKTVAEVAEKYGHGYVHMTSRQGIEIPFIKVEDINVVKEELAKGGVGTGVCGPRVRTVTACQGSEICPSGCIDTYTLAKELDERYFGRELPHKFKFGVTGCQNNCLKAEENDVGIKGGMTVECSHDDCIQCGVCVKACREGALSMEDGRIVIDRDKCNNCARCVKSCPTDAWKGTPGYIVSFGGLFGNHIYKGEQLVPIIRDKETLFRVTDAAISFFEKHANGGERFRLTLQRVGEEEFKKEIQAAYEGKMRFNTSLLHAGVTKETNGSTLPPVYQTSAFEQESAADLEKIFENKAPGYCYTRVANPTITAFENRITKLEGGIASVACASGMAALMNTFLNILSSGDELISSASLYGGTIDLFHDLEAFGITTRYVENNNWQQIEDSINEHTRLIFAETIGNPCLDVTDIEKLAEIAHAHDIPLVVDNTTSTAYLIQVLKHGADIVVNSSSKYINGSSNAISGILTDSGKFKWDKNRYPGFADYVKYGPMAFVAKLRNSLFRNMGACLAPVNAYLNIIGLETLGLRMERECSNALELASWIENNYPDIKVNYPGLCSSKWHEIAKKQLTNGYGAILTIRVGSKEKAFKFIDSLTIPYTLSNIGDTKTLVIHPGSTISLHSTDKQKEDAGVFEDLIRVSVGIEDIDDLKEDFAQAFANIADMFDIIIIGSGPAGLSAAIYAKRANLNVAVAEKEYEGTGQIAESGNVNNYLGLPNINGYDLGEKFREHAVSLDVEFIEKEAVQIEAVQNGEKEESVIYRVKFDDDTIAEARALIYTAGAYPRKAGVPGEDEYTGKGVSYCAICDGAFYKGKTAAVLGGGDTALDDALYLSDICEKVYLVHRRDSFRGAQSTVELLKQKENVELVLNETVTEIYGEKKPTGIKLKSGRTLAVDGVFVAYGSVPQSELIKNLVQLDERGYVVAGEDGITYAATKNGDHDRSVQPGLYVAGDVRTKTLRQVVTAVSDGANAATTAAEYLRDINGYKMSKNNNEKWWKKAVVYQIYPKSFQDSNGDGFGDLQGIIKRLDYLETLGINAIWLSPVFKSPQADNGYDISDYRDIDPTFGSLDDMEELINEAKKHNIRIMMDLVLNHSSNEHRWFKEAKKSKDNPYHDYYIWRDGDEGVPPSDMKACFGGSAWEYVPEIGQYYFHQFLPEQPDLNWENPKVRRAIYDMILWWMDKGVGGFRLDVIDQIAKEPDKRITINGPRLQEYFKELSRETFQKGDLITVGEAWGADTERAKLYSNPDGSEFSMVFQFEHIGLDQKEGGEKWDLAPLPFKKLKKIIAHWQNELYNCGWNSLFWDNHDLPRIVSRWGNDREYRVESAKMLAILLHGMQGTPYIYQGEELGMTNVQYDIEDYKDCEIINMYHERLEKGYSKDEIMKSIYAKGRDNARTPMQWDDSANAGFTTGTPWIKVNDNYDKINAKSQVDDPDSIFSCYKKLVQLRKDYPVFVDGKFTLLLEDDENIFAYSRKNEEKTMIVVCNFFDKEIPMPLAKECEGMEVLISNYKDTSDMSVLRPYEARMYIRMERKWWHDKVAYQIYPKSFLDTNGDGIGDLRGIISKLDYLKSLGIDIIWLSPIYKSPFVDQGYDISDYYAIAEEFGTMEEFDELLAEAKKRDMHIIMDLVINHCSDKHEWFQKALKDPDGEYADYFYFRKGKNGNPPSNYRSYFGGSCWEKVPGTDKYYLHMFAKEQPDLNWENEKLRQKLYEMINWWLDKGLSGFRIDAIINIKKNLDFPDFEPDAEDGLAACYKMVESAEGVGELLEELKNNTFKKYDAFTVGEVFNMKPEELPEFIGENGHFSTIFDFCAQCLSDGEHGWYDAPKIDFDKWRKSILGSQLETEKYGFKANIIENHDEPRGASRFLPKHAQNPAGIKMLGTVSVLLRGIPFIYQGQEIGMQNAKWNSIDEYDDISTKDQYKAALAAGLSKEQALAACGRMSRDNARTPMQWSDEANAGFTTAKPWLKVNENYKAINVAAQEKDPSSVLNYYRRLVALRKSDEFKELFTYGRCVPAYEDTDGIMAYYREDENKRVLVVANFGSKEAQIRLDGSVKKVLLSNTNDAEKSTVSVGASELKLESCEVLVVLVKMKNNNPPALGQKENAKHGEVFFPVQKYITRLAADYPVITTHWHDEAELTLITKGSCTYQIDLLEYEAKEGDIIFIPPLLLHSISIRDCDEFYSETYVFHINFLGGNNTDICSSRYLTPLINHEFAMPYLIAPKHPAYSSLCKCFMRITKLYSSQEFGYELALKAFLLQAIFLLLQYSEKNADFGVNTSSDKLKNVLDYIEVHYAESIQVAELAGLCYFSEYHFMRFFKKHMNMTCVQYINNVRLEKSVEQFERGNTSILDVSLSVGFHNLSYFHRAFKKRYHMTPLSFIKSLEMRVLTDLEPKNVFSFFEDICSIPHPSYKEEKISNYLVEFAKARGLEHYQDELHNVIIIKEASEGYEDVEPIILQGHMDMVCEKTPDCDKDMDEEGLDLLIDGDFISAKGTTLGGDDGIAVAYALAILDDDSLSHPRLEFVCTVCEEVGMEGATGIDVSMLKGKKLLNMDSEEEGVMLASCAGGCRADVKLPVERETVSGTKLTVSLSGLTGGHSGSEIDKGRGNANTLMSRLLRDASAPVAIASIDGGRKDNAIPRECTAQIIVAPDEAAAVKASIEQAAAEIAEEFKASDPDLKLAVSEETDCSESAISAKDSARVIALIEALPNGIIRMSREIDKLVETSLNLGVLKSDDAAVTLRYAVRSSVGVAKKSLKNQLVCIAGAFAAEVTFEGDYPAWEYKKDSKLREDMVRIFEEMYGKKPTVEAIHAGVECGLLSGKIEGLDCISMGPDMYDIHTTEERLSISSAKRSYEYILRVIACKMIFRNLRNVNNTKCATYDIIFICFEDEGEKMRGKEINKLVLEICCGSFSDVKTAYENGADRVELNSALYMGGLTPTLANLIYAREKCNIPVVAMVRPRGGGFCYSDEEYDTMLMDAKILLEHGADGIAFGFLTEEKMLDKKRTKEMIELIHEYGREAVFHRAFDCIDNQDSAAEKLIRLGADRILTSGGAVNVWDGRKQLKHLQNQYGKDITILAGSGVNDTNARALIEYTGITQVHSSCGSWKCDVTAAGNAVDFSYDEAMKNCYQCADAGKVRKLAEEVSGEDSSMLGTEGTADYLVDAVKRRFGLEMVIIIRHFLVDSENVNDNWLMLFDMADEDDEIVVFYTKKSPHMSYMSVIRLMENNSINVRFEECYEGTNALDFQLVSYMGYLIGHNDSLSESTCEHASGNTEIQDNTKPYNDNSSATHIVANTEDVSAASCADEYIIMSNDTGYDPAVRFWKDKGFAVRRFNVNFCKQAVQRRKNIKYQVVADIPSKEDNVNNNTNINTDTDTDAITAKSYNLNELIDGNHSSYTDSEPLCDELATNDDLPSSDKLMTNDDLPFTDEQTPHNGSGNSSNKNEADEAKSSTDSIDTSDISEVSAVSKDFDHFEVDSFLNCMGKDNLLKLHETLVHVYGMKQGQTIYKTIKDKSYSFTPEKLTRKKKVERFTGIIFAHSDINDPGNFVDFLEKNKNKTKNLNGIRSAITKSYGETDGLKYYSLFKPYFKIISALKMIINITILEDNESDFITLSDSIKKWAANTGILINIIWLNSYKKFIKSLPTLKCDLFFSDIELNCNNSFTGIDACKQLRESGYTGIIIFLTAFKEYVFDGYDVQAFNYLLKPINYGTINNCLDKFIHLFSREFYYYHKGNDIISIPYNDIMYIEKNGHDVILHTTSNVFVERISLMLTSQIFPTMFNIVWEFIINLLESFLFAVICNAKFTKRQYHYHTAEQTLFILCKSLLITLMNISKISTIISLTSVLLLNIIFLILFFVNPIFNSFFVSFIYCLILITSDALTLLIPIKFYNINLSQVLYLGNMRILFSLIYISIIALFVIIFLLFTPQVFVLGKLDKISYFIISTICVILEEIVLIILLKQSIYAENFFHLLLFIFGLTLFLFVYISIYIYRLGKEKEKNDRLIQSITINQMEARQNEEIINSTHSLRVFKHDIMNHMSILYKLVENGKNSDALKYIYQINNSIERTSYTISTGIIPIDCIMTAKLSKALDNNISIKHQIHFPANYNISDMDLCSLISNLLDNAIEANCKLDMTKRRLQIEIKPYNNMLLLFISNSSNGIYLYGGNGNLLTTKTSNKNEHGIGIKRINEIVKKYNGIIEFDPGTEIFSVSILFPLDNMKKNKILVGVISIMFAGIIALGIIECNNSNTKDNNKLFIGNGKFCQAKRLNGLGAIYDDDYIFFDCENQIYESYNYSNKKNDKKLNVNCRNSACSHSNDTCEAYVELGEYFVFNSKIYKCYNKSKVVSGENRLYGSIVEAESGKTVFKNSIPTDMSSELAIDDSEAILYVRVLSDDIVKVDGDRHAYLLDKNFNIIYCHYNIGKFPWGAILNGNYYYINDINEIVKVNLTTFESKSIASNGKAFMADNDENFIYYSNEFSELYKLSPDDESSIKIADNALFFSVQNKYIYASGGDNGNKIIYDKNGKIIADYSACINMGADSAFQINDKIYTIFNGGVAYMDLDGKNYGEMMQMRYEIKKILSCKILMISMIVAFIFSMAISYNAYANEKINLREFSAYIGDFSEQKYDVIEQKVMELQNKYEETQNADVMNEMFVYLTLDKDALNCHNVIEYRDSVISDSEIKIKTESGYYKRMNETINKLYGKKTNLVIGESETLNEVYDLFCVTDIVDIVFIIVIILFSSYLFLNEHNNNTFYMIKSSYRGGKLSYRNKIVVTLFFSIMASVVETLGMTIWSVFWNKIDQWNTSILLNNAFLHSPYSITLFEMIIVVVIMRAIGFFVLSSVFIFVSLFFKSNIVPIAINTFIGLGGIAINYILSGKYFALSGGTIREAENYDILRKYTPFPLISESVNYFKEYEPINLMGVPIQLLSYSLIINLVFAIIVIALGYYFYNTNFRESMLELIDIKKRYGSKEVLHGISIKFENGIYGLIGPNGSGKSTIMNIMSDVLDMSSGKILYNGTDIKELDDRYREKIGFLPQNVGYYPNFTAKKTIEYFGYLRGVNKKELDSNVEQVLRDVNLYENRNDKVKSFSGGMKQRLGIAITCVANPEIIIFDEPTVGLDPEERARFKNLIRKLSKTKTIVLSTHILSDVEEVADYIILIKEGCLTKFEKIGGKDNEMNNVTKMELYKVLSKPQVYIIFVVGLIIQIIMAGQMRTTMFNGYHKSVYENYMNEMEGEYSIEKKEYINSEYQKFQAIIDDKQKNEIAFNNGKIDGKDYHSIINEEKKAQYRIATVKYIVEKTEYYDSLDKSAQYFYDIEISDYIENLRFNVIPIIVILLIVVPMYTDDIYAGTLAMIKSSKNGRMILLKSRLNISLLISLLICILFAFVEFVTKYIIFDLGNLNAGVESLMIERTMHLPYIISDLSIWQFIVLLYLFYLIISVMISIIGLLVSKISRGNIEAFSIMSVIIVGVSYILNILMQVQRKTLTQLSIPICFETLFYMLSGMVDTLMLSSVSDQAVGAVGTANTYISVFIIMFGVISSGMVAVMTQNIGAEKPGIAYQARQLGLIFNAVIGVLMSVFLAVFSGNILKMVSIAPALFDSANTYLRIVGGACFLNALIPIYSSYLRVFGYTKQSLWASIIGNVINFILNAVFLFVMNWGVMGVATATVISRIINLIIVATMGAVLIKAKDSPERIAPGKILGQIIKIGFPSACETALYNIAMTLVVRFMNQMDADGLNVTARSYALQIANFSYCIGAALAQANAILTGWHIGAKEYDECNKGTRKAAIYGVITASCLSITFALLGNYIARIFTNDVQMINLVTKLLAIDIVLELGRVTNLVYGQALKTSGDAVFPVVMGAVFMYLAAVGGTYFFGLHLGLLAVGAYIGLASDECIRAVGMVLRWKSGKWKNKGLVDMYFELKENRPHGTPENPFSQYHISDVKRAFQIPVHWHDELEIIYVKQGKLHVTISGENYIGSPKDAFVVSPGSQHFMGSPTGDADYYTFLFPLEYISFQADDLMEKSILSPLKRGRLMISPQINDTAADICERLIEINAQISGKNAENTDAANIEAQFETKITLIKFIRKMWRNGLILENGTNGINTTEKEMITYIWQNYTREISLKEFGAQFHLSEKYISRYFKEHFHITLSQYVNHLRLEHARQLLEESAASVTEVAMCSGYQNVSYFIRSFKKMYGVSPLKYRNFQTLPMKKKVLSVILAAVCTMGLMAGCGAEGSKGSTQSGAKGDSYTVGISQFAEHGSLDNCREGFLEGLKEEGIEEGKNLKVDYQNAQTDTGTASTIADSFVSEKVDMICAIATPCAASAYNSAMNADIPTVYTAVSDPVVAGLAKEDGSSVGNITGSSDVLPVEEQLKMIREMMPDAKKIGILYTTSEANSCSTIEEYKELADKYDFEIVDTGINTSADIEIAASDLVSKVDCLCNLTDNTVVNALQTVLDKANGAKIPVFGSEIEQVKSGCVASMGIDYYQLGIETGKMAAKILKGEEKASDTPFITASKAELYVNTAAADKIGMTLDADYIKDAAETFDKIEVKMTLVLSVLEQGMIYAIMALGIYITYTILDFPDLTVDGSFPLGAALSAVLITKGVNPILTLLVTFAAGAFAGMLTGIIHVKLKVRDLLSGIIMMTALYTVNLRIAGRANLPIYNMTTLFDNDFVRNVFKGGLAQFSNVIIILVITLVMKFLLDWYMSTKSGYLLRAVGDNETIVTSMGVDKGITKIIGLAIANGLCSLSGCIFAQQQRYFDVSMGTGTMVIGLASVIIGISLLKKATFLRVTSSVVIGAIVYKACVAIAIKLGMPSSDLKLITAVLFLIILVLGMDRNKRKKVAMLELNHIHKLYNPGTVNEICLFDDFNLKIDDGQFVSVVGSNGSGKTSMLNIICGSIPIDGGSIVVNGTDITKQKDFIRHRRIGRVFQDPSKGTCPSMTILENLSIADNKGKTYGLGRGTNHSRIEHYKEMLAELNLGLEDKLHTKVGALSGGQRQTLALLMATMNPIEFLILDEHTAALDPKTAEIVMQLTGKIVAEKKVTTIMVTHNLRYAVEYGDRLIMMHQGKAIIDKAGADKKAMQVDDILGTFNEISIECGNMKKGDLFVITGMSGAELAIRVLDIPDDDIIIPSSSPTMNKEKLLYENSKHALQSDNIIAITNRHLCSRPFMEQLERVCKLHPHAIVLREKDMPEAEYLSLARDVIALCKKYDVQCMLHSFINVAIELEHPYIHLPLPILEAYVKKDLSDNISTDMSKSTDNYQQFFKVIGTSVHSVEDAIKAEQLGATYMTAGHIFATDCKKGLSPRGLDFLKNVCDAVEIPVYAIGGINIASSDDSTASDAPPAYDAMPDISVPRLADVMECGAAGGCIMSGMMRVMTNDTNITNDKDINANIAHDDHFNDSIVNEVILEDMKKNRIDHMKYLPDMEVLDSDIMDRVVAEMDAYDYDQYTAADVRAALSHEYRTLEDFKALLSPAAQPFIEEIAQAAQLETRKHFGNSVCMFTPLYISNYCENYCIYCGFNCHNKINRAKLNASEIEKEMAAIAKTGLQEILILTGESKKMSDVEYIGEACKIARKYFKVIGLEVYPMNSDEYAYLHECGADYVTVFQETYNSDKYETLHLAGHKRIFPYRVNAQERALKGGMRGVGFAALLGLDDFRKDALATGYHAYLLQKKYPRAEIAFSCPRLCPIINNDRINPKDVHETQLLQVVCAYRLFMPFASITISTREVARVRDNLVNIAATKISAGVSTGIGSHVDDIEDKGDDQFEISDGRSVDEVFNALLDNGLQPVMSDYIYVMSKNIDLANDKLVLGGHEFTSRFILGSGKFSLDLVKACIEKADAQIITLALRRANDGGLANILDYIPDNVTLLPNTSGARNADEAVRIARLSRELGCGDFVKIEIMRDSKYLLPDNFETIKATEILAKEGFVVMPYMYPDLNVARDLANAGAACIMPLGAPIGSNKGICTKEFIQILIDEIDLPIIVDAGIGRPSQACEAMEMGAAAVMANTAVATAGDVEIMAEAFKKAIEAGRMAYLSGLGRTLTKGASASSPLTGYLRDMVKINGKEAADVCGMTVSQYLSANNYNPKHIVVELNEEILPKTEYDSTAIADGDVVEILSFMGGGMFDEEMITKYRYIILLLGTAVSFVLGFAVAFALAKLCGVMAVKAVLNIAFTAGGITGMLGFVCICLAELRRIMTYDEIKKDKEICECLRKGDENLGVLGYTDHSAAHCTMVAKRAAYILKKFGYSEEDIELVKIAGFMHDIGNVVNRKHHAEYGAILANEILKKTDMSMKDRITVVSAIGHHDESTGGATDPVSAALIIADKTDVRRNRVREKAKENFDIHDRVNYAVTDAALKINIDKKVIALNLQIDTSICSMYEYFDIFLGRMMMCRGAAGILGATFKLTANGSKVLMITWNNLDTLESFKELSKVGRVDIKEAMSGDNGAKRVKEYNIPMAEGFTYNFAAKQVDADVLEALANLAKEAQLTEKFEALYNGAVINTGENRLVLHQLTRGQLGDAVVADGVDKRKFYVEQQERIAEFANKVHSGEITNAAGEKFTTVVQIGIGGSDLGPRAMYLALENWAKKNNTFKMEAKFISNVDPDDAASVLASVDVAHSIFILVSKSGTTLETLTNESFVKDALKNAGLDASKHMIAVTSETSPLAKSDDYLAAFFMDDYIGGRYSSTSAVGGAVLSLAFGPEVFAQFLDGAAAEDKLSKNADIMENPEMLDALIGVYERNVLGYPSTAVLPYSQALSRFPAHLQQADMESNGKSVNRFGEPVDYVTGPVIFGEPGTNGQHSFYQLLHQGTDIVPLQFIGFKNNQLDTDVVIQDSTSQQKLCANVAAQIVAFACGKADDNKNKNFEGGRPSSIIIGDQVNPASLGALLAHFENKIMFQGFLWNVNSFDQEGVQLGKILAKKVLAHETDGALKELSDMLNIMLETIIIVVCAAVCIGAAAYAWWMENGPEKDDSDAAGNNSHSHAYTKYDSNIKDDIVFHKAHKMKKILVLPLLLCLIFCSFLSLDKNLDEFDPDRTAYGSYDHRVVWGSYASSDKAALPQQEVLDSRAVLYSESDMSALMDCQYIEEIPSFPAVICRIRTSSLGFLGRLTSNLSWLGALLQLIHIILFAYAAIVVMRICLTNTSRRFIIRFIHDKDGHKLISFADYFKTRAYAEEIMRLLYLFVFNENKAPTLIENSPLSRLLRSLTLLQFSIYVGMSNNHIRPCMRACRCACGYCTSLFTNKGCTSPEVHPKSMETRIALIGIIVENPDSVEQLNHLLHEYGSFIVGRMGIPYEKKNVNIISVAIDAPQDIISALSGRIGRLDGIGVKTVYSNKMTENTAIIKIIDEITACRNITLEQLHMLLETDDMQAVDYLRKRASEKAHETYGNQVFIRGLIEFTNYCKNDCLYCGIRHSNTHADRYRLSTEQIMACCESGYELGFRTFVLQGGEDPYYTDERICEIVSGIKAKYPDCAVTLSIGEKSKESYQSYFDAGADRYLLRHETADEKHYSRLHPAEMSLANRKQCLWDLKEIGYQVGCGFMVGSPGQTVETLYEDLQFIKELEPHMVGIGPFISQKDTPFANEKSGTMDETLRLLSIIRLIHPKVLLPATTALGTIHPLGREKGIQSGANVVMPNLSPVNVRDKYKLYDNKICTGDEAAECRFCMENRMKSIGYQVVVSRGDYADMMYNVKSLKAEEFISDEEIKETLEYAEANKNNIGLIDAIIEKAKLKKGLTHREASVLLACEIPEKLDEVYKLAQQIKKDFYGNRIVLFAPLYLSNYCVNGCVYCPYHMKNKHIARKKLTQEEIVKEVTALQDMGHKRLAIEAGEDPVNNPIEYILECINTIYSIKHKNGAIRRVNVNIAATTVENYRKLKEAGIGTYILFQETYHKESYEQLHPTGPKHDYAYHTEAMDRAMEGGIDDVGLGVLFGLDKYKYEFAGLLMHAEHLEAVHGVGPHTISVPRIKHADDIDPDVFDNGISDDTFAKICALIRISVPYTGMIISTRESQAVREKVLPLGVSQISGASKTSVGGYADPEAEKNAEATSEQFDVSDQRTLDEVVNWLMKMDYIPSFCTACYREGRTGDRFMALCKSMQILNCCHPNALMTLKEYLEDYASPQTRELGMKLIDREIEKITNPKVKQTCYEHIHDIADGKRDFRFMGNLNETPSANSLHIGIYGKTNSGKSSLINAVTKQEVSIVADVAGTTTDPVYKPMEIHPLGPCVIIDTAGFDDDSELGERRVEKTHLAAEKTDIAVVVLDIAEVIAAKKAGVPFKKAFKDEAEWSLLFAKKHTPVVFALNKIDEILLSAEAQEKSRGKLDNAAIEAAKCWVYEENSAVMGKNADNSFEVVAVSALKGKGMDAVISALTRLLPEDFGQEFILGDLVCETDLVLLVMPQDIQAPKGRLILPQVQTLRELLDRKCLVMSTTTDKMTDALAALSHAPKLIVTDSQVFGYVYEHKPAESMLTSFSVLFAAYKGDLPYYVESARAIDALKPSSRVLIAECCTHAPLAEDIGRVKLPNLLRKRVGEELTVDITSGTDFPDNLSQYDLVIQCGACMFNRKYVLSRIDRARTQHVPMTNYGVAIAHLTGILDKVSMPMTKTSDFDDKVNYSDDYKGNYSNNYSGDYRDNYSSDYSATGYARLAKSLIDIVKEQQAKLGYRKEIVRLYYPLSTLRHFFECAGADNKIATGMISEQQMLEILAPNNLPKQLTDTIGEIKVTAKNERFCIEIPPEGSEYVHENTADNEFISELIALVGTHGCTMEQITELFYKYSDDIEKKEMQNGEFDCYIRFLNEPDDTYYYCFHDEGCHIIYHRFLPQDYADFGFMATFTRKAIMKTFLHILKNKPLDRITVKDICEQCEINRNTFYYYFKDIYDVLEAIFEDEVRLVMDEAKEGVTFHDAYARVAAIILNNREAIMHIYASENGRVLRTYLDAVVTQMVRRFVLEKAEGYSLDDSDIAFITAFYSNGIVGSTIKWIERCSMMSGLPETITANGVGLSKSQYNRDIVKRIGDSFDATIYDMIECCLMHTLVHVKNAYTVMTICLIALGAALLFMPQLGLKTMCMLYGVFLIIYGVTKLSGYFAKDLFQLAFQFDLALGIVSIVLGIIIIKKTEYIIEILSTAIGIFMLVDGAFKIQTAVEAKRFGIENWWLILVMSFAVTFVGILLFATPFETAGMIVRLIGLNLSLDGILNLFVVRNTVETIRRNTKWEIMGNLGHQAARLAASKICDNIVKGLCKDPETEVVKLIDMWQKFMGDEKIDLNYDSARKMICDKDCTLNKYMHRLINEIDPHVLKTIALNLGFEAFVYGTKTIRKNREKYGCNVPWLILMDPTSACNLHCTGCWAAEYGHKLNLTFDEMDKVVTQGKELGVYLYMFTGGEPLVRKADLVKLCEKHSDCAFLAFTNGTLVDEAFCADLKRIGNLYLAISLEGFSEVNDLRRGTGVFAKVMHAMDLLKENGLVFGTSICYTSKNYKTVTSDEFIDMIVEKGCRYALYFHYMPVGNDASLELLPNPQQRLYIKDRVREIRNMTSGKGIFTMDFQNDGEFVGGCIAGGRNYFHINANGDAEPCVFIHYSGANIRTHSMLEILKQPLFMAYHDNQPFNENHYRPCPMLENPEILQRLVKETGAKSTDLQSPESAEHLCNKCKEYAQAWKPCADKLWAEEGHSNMIFETHAHYDDNRFKDDRDETIKRVHEKGVAPIINVGASIGSTMTTMELAKKYDFIYAAVGVHPSDIADLNEETFAWLREQTAWERTVAVGEIGLDYYWDKEPNVQENQRYWFKRQLELAAEASLPVIIHSRDAAQDTMEIMTEAAKKNIRGVIHCYSYSPEMALEYVKLGYYIGVGGVVTFKNAKKLVQTVSELPLDRILLETDCPYMAPEPHRGTRNDSSNIPYVISKIAEIKGTTPDEVERTTRANAFELFTRVNNMAYLGNPKNTIEVLQKYNFNFQKKFGQNFLIDTGILEEIIDSAGITKDDMILEIGPGIGTMTQYLCESARQVIAVEIDTNLIPILKDTLSEYDNVKVINDDILKVDINALAEEYNNGKPIKVVANLPYYITTPIIMGLFESHVPIDSITIMVQKEVADRMQAGPGKKDYGALSLAVQYYSHPEIVVNVPPSCFMPQPKVGSSVISLKRYEKPVVDVDDEKLMFKIIRASFNQRRKTLANGLNNFGGMGLTKEQIQQSIEALGVPVNVRGEALSLAQFAQLSNIIGAAKMKKQQIAAAACLVAGAIGFAAVYSTQKPGKDEIPTEISQTSSIVEPTEKKTPQKTTEKVDSETKMGQEESAAGQQENQQPTEKQLHFVPENVTNWPVKGDVLLPFSMDKTVYFPTLDQYQYNRGMVIRANEGDAVCSVTEGRIIDIYDSAETGCTVVQDLGDGYTATYGQLANLTCSEGDVLEAGETLGTVGKVTRYYTVEGTNVYFAMEQDGKPVNPMDYFGDIMGFGYYHLAMILYCLNDYDNIFDIVVRAIDHLEKAQRMIIEMDRADMDENYTYIVRCADGTLYTGWTNDLKKRIKAHNAGKGAKYTKTRRPVELVYFEHFATKEEAMSREYHIKQLKRAQKQALIDEMNKNNKSIFTQNGMKKKLVTVLLASSMVATMLAGCGSGSGDGTEKGSSAKGGDGSVYMLNFKPETDQAWQDLAEKYTDETGVKVTVVTAADGQYKTTLKSELAKKDAPTIFNIGSTADCAEYDKYIYDLKDSEIYKHLTDKSLALEYNGKVASVANCYECYGIIYNKAILENYCKNYSGAVIKSVDDIKDLDTLEKVATDINEHVDDINKACDLHLTEAFASAGLDSGSNWRFTGHLAGLALYYEFKDAGCDLTAGQKEVTGKYMDNFKRVWDMYTNTSAADKATLDSGSLNAESELGMEEAVFYQNGDWEYANFADDNENGYTVKQSDLSMMPIYFGVDDENEGLAVGTENHWTVNAKADQKDIDATLEFLNWVITSDDGRDAIVNKMGLSAPFDTFTGDYESKNAFANVASELVKEGKTSVAWSFNATPSVDDWRADFLAPLTEYTERNGSWDDVAKAFSEKWAYYWDLQNEQMAAFTIGFIVPFVYGIFLSFCKFSTVTDWKWVGFKNYTRIFVVNGTVDTTFIHSIWYTALFTVVSVLIINIVSFAIAMALTKGIRGTNLFRTVFFLPNLIGGIVLSYVWLMIFNSILQNYSKTIVSSEWSAFWGLIAVVCWQQIGYMMIIYIAGIQNIPGELIEAAKIDGANRWQLLKSVILPMLMPTITICTFLTLTNGFKLFDQNLALTGGNPGKMSELLALNIYNTMYGTTGWQGVGQAKAVIFFIIVAIIALAQNKITTSKEVQDMAKQKKAQEVSAVRQAKHGWIITLLFTVLSVLWISPIFMVLLNSFKRKAYIFKHPFGISTVSITEGFEAFKDGMSRLFCSTLNYKNGLRMTHFWDCFGNSLFITVGSVVLIVLCCSMCAWYIVRVKTKGTKLMYTLCLFSMIVPFQMVMFTLSKFANMLHLSNPLGIIIVYLGFGAGLAVFMFTGFVKSISLEIEEAAMIDGCTPLQMYFRVVFPILRPTAVTVAILEAMWVWNDYLLPSLVLNINQYKTIPIAIQYLKQSHGMIDWGAMMAMLVLAILPIVIFYIVCQKYIIEGVLAGAVKGMTIVDIAKESGYSVTTVSRVLNNRQDVSPAAKETIMKIVEAHNFVPNNNAKRLKQTISRNIYLLVKGTSNMLFANIVEEIQSIIDRTDYSLSITYLDEDSNLSSVTDRICRERKPLGIIFLGGSRVDFSEDTSSFKVPCVIVTTSAENWSMEELSSVAIDDEKAGETIVDYLIEHGHTKIAEIGANLELSQTAILRHNGYLNSFKKHGITPDERYYERARFSYDSAYRAMKKLLEKNIEITAVYAISDVMAIGAIRAILDKGLRVPEDISITGFDGSTLAEYYNPKIVSIRQPHKDMAARSVELLFSMIDLHKGSCHEIIPFELTEGESVARIDMEVNNKMKHTIKVAWAKGFSQFLALAGAILLVFVLFKFDAIMAQIMRIINILMPIIMGIVLAYLINPMVEFYDRKLSNSLGKAIEKKCGKRPSMRGLSILISLAIIIAIIVVLIMMVVPQLVSNITNAVSLLPDQIQDLVKKITELAKNNDRAKEIITELYNNGISYFTEWVRDNMLGQVTFVINGIMGIFGTAVNCLVAFIVAIYVLLSKDTFKRQTKKLVSAFLPERHIQVLSSILKESDKIFGGFISGKIIDSLIIGAICFVCCLILRMPYVALISVIVGVTNVIPFFGPYIGAIPSTILIMLDSPSKGVIFLLFIIILQQVDGNIIGPKILGESTGLSPFWVVFAIFLGNGLFGVMGLFIGVPTWGVVYYLIKRYVNYRVRKKEMKTDMTKGNPMKIILLFSIPVLIGNLFQQFYNMVDTIIVGQYLGSKALAAVGSTGCIMFLVLGFANGIAQGFGVMASHAFGAKNEKLLKHYVALAIILTVIVSVVLTIPTVLASRQLLIWLNTPDDILVMADAYIKVIFAGIFCTMSYNVASGLLRSIGDSKTPLYFLIFSSVLNIVLDIFFIVVVKAGTAGAAYATVISQGIAAVLSFIVMFKKYDLLRTSREDYYMDWSGIWRMLSIGLQMALNYSITAIGTMIFQAAVNVFGSQVVAAFTAASKVSNIATQTMPTLGTAAATYCGQNLGAGRYDRIFKGMKSCFFICIGCAVLAAAINCFVGPYMIGWFITSPTATDIDCAMKYLKIASVFMLPLAWIFAYRNGLQGLNKGLVPMLSGAMELVSRWIAILALSKPFGYGGVCFADPAAWLTTGILLIVTYYVWEMRMRKKIQIKMNYYELSNTVTPDTIGYKNGLWQKRYVQIYRVLIVVWSVLILSLLFGMFHRDDYSSGMIKSCLLLFFAGIIFLVLMLIAVVNISAKRTENWSLQDRHDYNLAMYRTRYRNNRQLQSVVLIVMAKQQLLMSNYDLAAQALAMVDINCVKLPYLRDYYFCNAAVLFLCDKPGWQEWLDKCYAVPANQKQMTDMQIGALFLSENAKMDLCQAIYADTRIKHKWPTAIVITAILVLYAGIFYGVGGLLSRGYHYRYWFELSSVLITYAGCMVLSLYWIIRWILFSDSVSKKSEGVRLFRKVILIVMWLCLMAAMVINLIISFIGMDTEKKVYANGLICMSTSDGYSTDEYYNIKVGPFLRRNLTFKETIKFGLINDDDSTGDSGNDAGDSGANDSENSTENNSQSYNDASENTENENAGNENADESLDTESMAVYDYMSAAGILSAGDAGIIRNGSTAKGTFYSVFETGEADGNTYENRLVYDRVSENGQCDLFVYEQLVSGSDTRLLGFYAVNKTTNEVFSADRNSWGGVSSREYQDATGENMGKKQVTFADIAEYTHFSKTTISRYFNHPDSLTLENQEKISRALDELGYKKNKLAKVLANGKSEFVGIIVPNLYLHYYSEMLTQLLATYANYHYKFLIFMSDKGAAEEENYIDELLAYQIEGLIVLSHTLSSEKLASYHIPIVAIERESMHISSVASDNYMGALQATSLLIRDKCDILIHVNVDVPKYVPAYDRIRAFEDTCTEHNIPYELSLNVSGDSYNDLFSQMKVIFNNIDEKYPDKKKGVFLANDTYANMFLNLVIQKYGCLPDSYEIVGFDNSPIANEAIIPITTIGQQIDVIARTAMDLLVKQMDNRKQRKPEPDLAPTHKKIAPVLIRRETTSMKEKKQSLKSKVTYVKKNWMLYIFFLMPALLLTIIFKYVPMGGLLIAFKDYNVIKGVLGSPWVGLEYFKRFLSSPDFMNYLMNTLKVSIYGLLWGFPVPIILALLLNRIRKEGIKKKIQLLIYAPNFISVIVLCGMVRMFLSPIGPMNKLLGISTNWMTMPAAFRTIYIASGIWQGAGWASIMYTAALSNASKELEEAARMDGANIFQQMWYVELPAIKNIIVIQFILQAGNIMSIGFEKAYALQTDMNLPASEILSTYVYRIGLLNGDYGYSTAVGLFNSVINVILLIIVNAVVKKLNDGEGIMEKDMKTKIKYSRTDKIVLGIGYTLLGLFVLAIIVPLVYVVLASFMDPTVLNNQGLSFNIKDWTIDAYRRVLENDMIWRGFFNSFFYSIAFAAISVFVTILAAYPMSKKEFVGRKFFNVIFIITMFFGGGMIPTFILINQLHMVNTVWAILIPGAFNVWNMILARTYYQSVPNELREASAIDGANEIQHFFKIMLPVCKPIIAVLMLWSFVGMWNSYFDAMIYLNDANLQPLQLVLRSILVQNTPQPGMIADIQSTAEMAKVAEQLKYATIVVSSLPLLIMYPFFQKYFDKGIMVGSVKGMDMKKRSFKKLITLSLTLAMLTGVAGCGKQQSLNAETNPDTPVSDVQFPLKEKAELSFITSAPATSTQDPNERTIFKRMEKQTNVHIDWTCFVSDQFSDKKNLALAQFGNLPDGLFNAGMSDYDLLRYAKQGIIIPVENLIDKYMPNLQAVFEKYPEYRTMCTAPDGHIYSFPWIEQLGAGKEAIQAIGDIPYINKKWLDYLGLEVPTTTDELEQVLIAFRDHADELEKEFDIEGGVIPMSFIINNGGQDPAILMNGFGEGYGDTGDHFAVTDEGKVIYTPTQEGYKEGIEWLHKLVTEDLIDPEAFTQEWSTYVAKGKNHRYGLCFTWDIANIDNNTDYVMLPALTGPDGVRNITRQNNSETSGFDRGRCVLTSSCRDTALAAAWIDQMYAPIQSPQNNWGTYGEKDSFNIFEMSTNDEGGQMLKHMDLGDQSPVEVREAQSVNGPLAVLNEYYDVYVTEPADAKWRLDNMHEAYLKDMNSKYVYPNVFMSIDDTNKVSQYDTDIKKYAEQKKADWILNGGIDKEWDSYLKKLDKYGLQDYLKIKQKYFDSYQKSLESTSEGKMSELLEKARSYEAKKIAATDKESKPLFHISAPAGWINDPNGFSVYNGKIHLFYQYYPYLREWGPMHWGHSTTSDMIKWEQLPCVLAPDEEYDKKGCFSGSAIEADGKHVLVYTGVTRIKLPDGSEQERQNQCIAFGDGLNYVKHENNPVVTGDMLPENCSRIDFRDPKIWKEDDTYYLIVGSKDLNNVGQVVLCSSKNLTDWQFETILAANSTGKIGTMWECPDFFGLEDKHVLICSPQSMKADKYEFHNGHNSVYFLGDYDKENHVFIKEEPHTLDYGMDFYAPQTTLLPDGRRVMIAWMKSWDACVVPDSQDWQGMMTLPRELEIKDGRIWQKPVKEIENYRANKCHYTDKKIDCYTTFDGIKGRTLDMTVELSGEEYHDFTVEMACDDEYSTAFTYNRVAGVLEIDRTCCGVTKDVVCVRKIKIADTDRKLKLRFIMDRQSIELFINDGQQVATTAICTPLQADGISFNCDGSAVVDIEKYDIIMDVVALGELLIDFTENGTSAQDNKLFEANPGGAPCNVLAMLQKLGHQTAFIGKVGQDAFGRLLVDAVKEQGIDTTGVRYDDNVHTTLAFVQTAADGDRDFSFYRNPGADMMLTADEVDLSLVRNAKIFHFGSLSMTDKICENATKHAIAAAKEAGVLISFDPNLRKPLWKSMDDAKEKISWGLSQCDILKISDDEIEFMTGEKDIKTGVKKLIDEYHIPFICATMGKNGSMAFFDGHIVEAAPFLRDNTVETTGAGDTFCACLLHDVLEHGINDRKDDDVKKMLTFANAAASLITTRKGALRVMPEKGEVEAVIKMVKTIGIGKQDFASVIEDNCFFVDKTSFIKEWWDSKDDVTLITRPRRFGKTLNMSMLNCFFSNQYKDRSDLFDSLSIWEDEDYRKIQGTYPVIFMSFASVKADNLGDAKIQIKAQIEAVYKRHRYLLEGDTLTADEIADFEGTNTRMGDAESGLKLNILCEYFHRYWGKKTIIILDEYDTPIQEAYLHGYWNEFTAYIRSLFNATFKTNPYMERAIMTGITRVSKESIFSDLNNLNVITTTSSSYATSFGFTENEVFDAMEEYGLSGEKDTVKKWYDGFKFGNHSDIYNPWSITNFLKEKQISPYWASTSSNGLVNRLIRTASAEIKSMMETLLEGDSVEVSIDEQLVFEQLDNDENAIWSLLLASGYLKVDSLEKRGLTLEPWYHLSITNLETVSMFSNMFRGWFNASVSNYNGFIRALLRGNVKEMNIYMNEVALSTFSSFDSGKHPSGKSEPERFYHGFVLGLLVELRDKYEVQSNRESGYGRYDVMIIPRDKNSQAVIIEFKVIDSQEETSLDMTADSALKQIEEKNYDAKLLERGYKREAIQHYGFAFEGKKVLIKKAQIMKQKLSVAPTLKNYDKKNLPKDILAGIIIMAVSIPISMGYAQISGLPAVYGLYGSVFPIILFALFSTSPQFIFGVDAAPAALVGAAVLGMGIEAGSKEAMTVVPVFTFFVALWLLAFYFMNAGKLVNYISAPVMGGFITGICTTIILMQAPKLMGSAAGTGELFELSEHIWEALHHINAAALVMGIVALAILVVSKRLVPKFPMAVVLMVTGALFTYFGPVKEWGVPTLSAVEPGMPRWYIPDFEAVFSVQKASEVIVLSLSVAVVIMAETLLAENNFAQKNGYRIDDNTELLAFSIGNMAAAFTGCCPINGSVSRTAMSEQYEGKTQLTGLVAGVSMIAVLLFCTGFIGYLPVPVLTAIVISALMGATEFHLAKRLWKVSRTEFFIFVGAFFGVLILGTINGVLIGIILSFAEMIIRSAKPATCFLGVQPGHSHFRDIRESTNIHEIDGVIIYRFSSGLFFANAKVLVRDIEDHLKHDTKAVIIDAGAIGSIDITGADSIESLYRSLKQKGVKLYITEHIAELNEQLRKLGLGYLIEQGCVRRTIHIALKDMGINRPYPLEGGVDNEERSASRKRADNRVQEFVWAFGAESEEQIEKQIKLQIEQLKKTKDIEEIMHGRWAHMDEFDQDEWLEHLEEHLKEIVNISGKDVHTLAADIEMHRREVHERIAREHPELAERFAQRRHLLDKHLKERRPEVYRIIVQLREDNKHKMNINQTLKQYFGYDSLRTGQEELINGILAGHDVLGIMPTGAGKSLCYQLPALMLKGITLVISPLISLMSDQVKALNQAGVHAAYINSSLTENQIRMALSYASQGRYKIIYVAPERLNTPRFLDFACNADISMLTVDEAHCISQWGQDFRPSYLEIAGFLTRLPRRPIVSAFTATATERVKNDIVASLGLNNPVTMVTGFDRPNLFFRVVTRKGGSQKDNSIINYVKKHEDESGIIYCATKKNVDKLYTLLNEQGISAGRYHAGLSNDERKQNQEDFTYDRIRVMVATNAFGMGIDKSNVRYVLHYNMPQSLEYYYQEAGRAGRDGEEAECVLFFSKQDIMINKFLLQNKASAGDVASDMQKTANDQRKLQQMINYCETDKCLREFILSYFGDTTPCICNKCSNCVVVEDEEEETYVETGKKRKKAAQLAGLNELGVALFEKLRSVRTELAAEKSVPPYIICSDKTLKDMCAKLPRDKEQLADVYGMGEQKIQNYGEAFVTAVNSFVADNPNPSGSTTGERPQTVLSDEEAAETGSTRKKKLPFYIEPQRLDEVELTDKCRLTELTNKINELCPADKEHKKLAASFINELLIAEGYLEEVTEDGNKIKRVTEKGRSVGIDEEERKAKFGGSYYAITHSKQSQQVIIEMLKKHYSGIKPMRNEKVQKLTLTALMAALSYVIFTFLQIKVTLPGGSATSFHLGNAVVVLAALLLGGVYGGIGGAIGMTIGDLLDPIYITGAPKTFFLKLMIGVITGLVAHKLGKITYSTDKKHVFKWTVLAACAGMLFNFIFDPIISYFYDMLILGKPMAQLKIAWSVTTTGVNAVISVIAATIVYVALRPVLIKANLFFKIGKEKMNTQNTDKEISHNNINTNSSTKIKICGLTSPAEARYLNENHVDFAGMVLFFPKSKRNISIEQAKEIMAALDASIKRVAVVVSPSIEQVRQIEAAGFDYVQIHGEIPETEAQAAIAIPILKAFNVSDMGSYEKYHNDSRIAGYVFDAIEPGSGKTFDWKLVDNIPRDEKLLLLAGGLNPDNVRMAIEAVHPDGVDVSSGVENDNGAGKNPEKIHDFVSAIKSMSTEEIKEYIGTQLKALTSIASPTGFTKNATDYLMKQLEAMGYAPQLSNKGNVSVEIGGEGAPLVLAAHVDTLGAMVRSIKDNGRLRPTTIGGHQWSTADGENCMVFTRDGRMYTGVVLNTEPSAHVADEKVETKEENMEILLDKNVNDKQGVAALGIQTGDIIAMDPRTVITESGYIKSRFLDDKLSAAILLGVAHAVKEDGWKLNRKVTLLFTVYEEVGHGGSFVPADTEEMISVDMGCVGADLGCTEHMVSICAKDSGGPYNYELVTELSNLAKSEGLDYAIDVYPHYGSDVEATLHSGYDIRHGLIGAGVYASHNYERSHMDGVENTYKLLKKYITKMNLKKVHHIAIIGSDYEKSKHFYVDLLGFSIIRENYRPERDDYKIDLQLDEIELELFIIKNCPKRPSYPEAYGLRHLAFAVDSVDDTVRELNKRGIITEPIRLDTYTGKRMTFFHDPDNLPLEIHEMPQMNKGGKFIFGKSLIRTDGTLRIPPQAMEEYHIADEGKVYLFTGSKITGGFCVTRKGLLHPSKLGHILDDTPPLLDYSAGSGEFIKYKGRSYCWVEISQEGQILLTKKMMDFLKVRPGMELLSIRSSDIAFTMGAKGPLLEKAENYDGEIPLFMEYRKFDNIIIARIDKGEEILEQLKAIAITENIKLASINALGAINDFTVGVYKTDEKKYYSNSFKGYYEITSLTGTINTMDGEYYAHLHLSAGDEKGEVFGGHLNRAVVSATCELVITVIDGKVDRVYDEETGLNVFNFMLAETAHNAGVITNEEFAIFQNAGYMGLYGGLDVEGILAAVYQSVFGGDVYLSLEEKVANLLFNEIGNSQVVMTKRIITISREFGSGGRFIGEEVAKKLGIKYYDKEIIGQIAKESGLAPEYIKENAELSPKKGIFAYAFTGRDITGKSVEDMVYEAQRKVILDLAEKEPCVIIGRNADYILKDRDDVLNVYIHGDMPEKIQRICKLHNTSEADAVKMINDIDKRRMTNYNMAESNKMKEMPVNKLMVQMGIPMILSMALQAVYNIVDSAFVGNMRSGSEAALNALTLVFPVQMLMVAVGIGTGVGTNALLARTLGQGNSKKAAKVAGNSLFLGAIIYIVCLLFGIFGVKAYISSQTVDPQVISMGTNYLRICCVISFGIIFFSLFEKLLQATGRSLYSTIGQVVGAVVNIILDPIMIYGIGPVPEMGVKGAAYATVIGQVVSAILLFVFHMKLNREFEHDTKYMKPDGGIIKEIYAIGLPAIIAQALMSIMVYVMNLILKFSPSAQTAYGLFYKVQQFVLFLAFGLRDAITPIIAFSYGMHSKKRIKDGIRYGLLYTIVLMVIGVAITEIFPGEFAALFNAGASREYFIGAMRIISISFIFAGINVAYQGIYQALDGGMESLVISLLRQLIIILPLACIFSFFVRGGHIGVSLIWWAFPITEVTACIVGYLFLKRINKNKVESLNMTDLKITKDNNNICVYERLNDDCIRLLHMYGKNPVCVVPDMLDGMRVTELAEYCFSFKSMPEKLKTELGIDDILRPDMTELCDDYIERVILPDGMQKIGRLCFYNCSRLSALELPSDICDVDGDAFMNCTKLYMLVMRGSPKDKSCLKQILSQISTLVRVRWAVSDGNAIAQACFFEYDQTYDEIGPAHIFKLNMNGEGFRARQAFMDRVFVWKQYDEIFSEAIAQESEDDLLDMAFYRLIYAYELSKEARQQFLEYIVNHKKRLSELIIRKRDLVLLQSFLELKDDEENFIADVLAVTDMIALSAQDEWSEGSVILHRFKKENLSVSRKRRFEFMKVEEVISRGADSMDAKFERRFKSFCNSLDALAEARQRDLTDSFVLSGTGAKFSITFDLSWKVMKDILVQYYSITGFVTESPREVLRESFKAKLISDDAWMDMLKVRNELAHDYDCEIIRTHCNTIVEKYIDLFYDFKNTINDLLRLGMKFTIKHESRGRMRVHMEQYRMTYEQADTLLYVIHNHRNVTFVKVYDRTADAVIEYVGDREQIIELLRHFHYESANVPQTVIKTSGRELNNSYQEKLIGSVVWHYSKKLLLPLPIRIALTIGRSVKYIGIGLKCLLQRKIEVPVLDATAITVSLITKDFSTASSIMFLLGIGELLEEWTHKKSVDDLARSMSLNVSKVWLKTPENQEILVESSKIEKGDKVVVHMGNVIPFDGEVLDGDAMVNQASLTGESVPVQRTVGNTVFAGTVVEEGEITIRVKEVEGNNRFDQIVTMIEESEKLKSELEGKAEHYADKLVPWTLGATGLTYLLTRNVTKAMSILMVDFCCALKLAMPISVLSAIREASLYNVTVKGGKFLEAVAEADTIVFDKTGTLTKAHPTVVDVVNFNDEYSSDDMLRVAACLEEHFPHSMAKAVVDAASKKGLSHEEMHTKVEYIVAHGIATSINGKRTVIGSYHFVFEDEKCVVPAGKEPLFESLPLYYSHLYLAIEGKLSAVICIEDPLRDEAAAVVTSLKKAGISKVVMMTGDSERTASVIAKKVGVDEYYAEVLPEDKAAFVEKEKAKGRKVIMIGDGINDSPALSAANVGIAISDGAEIAREIADITVGSDDLYQIVTLKYISNALMKRIKSNYRKIVGFNSGLIALGVAGVLPPTTTALLHNGSTILISVNSMKNLLEMSFNWKASGLFAAGVAFGTAGIKILSSKDAKRAYTQCTAAALRAKDCVMKTVNTVQENAEDILAEAKSINEEREAKAEAAKVSDASEDVCECAKADEQAEVTAETAEVMLELKTKIAVRTVNRFLRDNPDNFDSVEWVLFDSYTESTNEMSYESKWKDRRPTDTINAVQEFLRGKDIHVEETNTTCMGSCYAVTLVVENTNLFVNGKGSSLEFARASAYGELMERVLTKVLFRYNYYDRYSKERDTIFFEDEVLFDEAEYKNHLSELGLRNCDYHSALDVQKYFTAFSSKLVMEPFNTINGEKTKYFPVSVLDVLFGTNGMAFGNTLEEAKTQALSEVFERYCNKEIINKEIIMPQIPADGSIFKDRLLEEIVEVKEKTGLEVTIYDASLGKGYPVISVIFENKENNTYFVKFGAHFDINVATERCLTEMFQGRRNNQSDYMKEKTYLDDSLWRKKNLESILHTGDGYYPVDVVNGGISEYKFEKWPEFHSNSEALEFYTNKLLEISDEVYFKVYKEKGFNVVRYLIPQVSQIYDDIAYKMRWQGELNDISNLLERTDDITENELKDCIDFISNNCSSASNTIIPFFKHRFSYNSIFKYYNLYLLKFEYYIMCGKLDSVKEIMEKYKNKSNTNKDILSAMTLLIEKIKGDSDNIKEYKMLLSNKLFKIDQLHSDDYCKCNICNCQKIKKAYDKFLIALPKDVMYYIIRDGYSVINEKDNIAFYDIKTKRMINVFNIKGSTEYSVAELLNNPINTDLLDEVWSRYWKLITGNNSIMQFFVQVDEFAYLDEKKKYDCINEFINLNRDAYEMEKWAFFAAVKHVVWDSEIIYVGKTDLEKCFEELNWNSAETLDDSNLKENNLYVINLNEVDAEKIESFERIAVENSLARLYICEDFSHIWIGPALYGNQFGCLMCNDYAKDKMVTNRTPSDLLISLLKIEVIKLFPELIECMMQDNTLSKGKVFTLDKFDMSADQEAFGINVNCRVCANMKKWKTVKDEYHNINNILNFHRSTMHHKSNMSVNHIIPVIDNLLTKDNEEDSRIVEIDPAELKENEDEFFKILEQRRTSWQFGTPMNREQLSALLTKAFGISQRRKFGEFWVNLKTYASAGALYSVEPYIYINDVEDELNGGIWKYDADNSRLVYVADTDVCKVNGLTSTTKFGVQSFEKSKIILFFVANFEVIFKKYGMLSYRLVLLEAGHMCSNLQMVSTKLGYSTVPIGGFYDLEVKKMLKLDHDRVCLYMAAVGMSKWESLYIYCHNIEFQEKLMMELEPILDRMTEGWFFIKYWRGGPHIRLRFHDSGENIKEEIEGAVDKFFENNKVDNLDRDIYYSRISFDGKEEDSSKLPWHESGTCFYEDYIPEYERYGDGKLMEISENIFYHSSRLALSIFKNVKGINKRIVLSSYIIYKLLCYNNGLTLDFLNSYQTYWKKMVINEPKIKKEVICSVFDSIEKGRIDLSFMDNELEEMCNGFGKMRELTTDMERLYITSSQIHMMNNRISVTPDFEYIITREMGEWLGEKMENSKGMIELTHSLNKKMADRYLYDRYDKFSEENLPSEYFSLDDDSIRVDIPQDETKIKKLMDEVMCLIYMEPDNPYNYHTTYASARGFNSNEIVLEIVGNHSRKIFIYNLTQNEFDLISREKCNEVSFVANMYIICNRGKIGRKYGDFGYILSLLDAGHFIENIKCFSIEEKLSFTLDYNPCTSIDMLRLPKPYQIVPLVKLDITDFFVKKQENLWDNENVNKVKFSDTYTGNKSGSLVDKFIDKVLESKVPIVEKFSNIRTSVKVKELLMRTSSQSAQGYSFFPYECPDDVLDEIIDSVKLSLADVTDDLICVQLVMNTDSVRVYEIKRDHVNTKELNDIDMNSLPHDSLDYVDLKNVSVGVIMYTNCKLYEMNEIWYQYTYIKMGEIAQRISNICGTKELSARPMKNMNDLYMKNRLMESDSYDPGYFIVIGKSMNDSLKMLMRMIYAFDRCFFIKNSDEKSAKKVLGERLYTNKRIKLDFSYDIVEENDDFVTRKIIDDYCKASKEIDDYEFCELMYKDYSAKPYNINISELPAIDKESEEYQNYNPPFKGENLRISDSVELTRFKEENFDEKYGIITNIYKDMNSSDISIVGCEFRYKDELNFSYGREKGFKKAEDSAILELIERLAIYDVEGEIKKVSYDENNGLNLVNPEELLYYSQEFRNAGNKFDSSFPYKWLKVEEWGSNKGAYIPLQFFSMDVDDENYFVFESSNGVALGSSIYEAKLFALFELVERDAFLNFWYKKARLYRIDINSVEKKVQEKIARFETEDKKVYIFDMTFDISIPSILCLAVDFRGKVATYISTASHVNYNVAINAAVNECLVGHRIYETNPRIGEKEYNSDYDVVEMFDHVNHASRREYIKNYDFLFESEVKTVEELYGSESYKISDSIDDAKDLLDFICKTKLNNHGKIYFADLSTKMSYEYGFFVAKIVVSGMLPMTFGYANQRINRERIKNAIQNSKYSDRCLCKGDEIDDRAHPFPMKKYLMYRYNSFLKDEGSTSLIRVHNKEYRIKKEIFTYEELLKCMSYFKELREVETLEEYTLQSKIVRFLMQIGVLNYSEVTYPDAKILRYLIKNYIDFDQMMISLANSDIEIKVIGHESEQLTKLLENRIQMYFGDFSSNKVTRKTQIIVVDQRNDLDKIEEAIANIEADNYIVMAFNANKESWIYSTKIKSEVIQMLDQFMCCSEKKVRFSDAFCAVAANYMVLMLMDSLSGYRKMFNTYCINSSLEIKNKSFYGLKLGADAFRKVKEDYVRIDESVTEAEALNRFIVKSKDIIDMNFEYEFKNDGNINRVITRVKDKEVIEAEGKNELLLDAAKESVTETIIKLFQSYGVKVSLALGFDEIKRLFASEKSVYAFDDKGIFSKEGVLIFRVDMYHIQIGINISSEAKTDFIVNELIPFLEEHVKDNYYFTRSVNVIPVIDLYLNTSDIKITYIYSKIQSIFDKYLSNLSEASVQENKYYLDNQKNISRVNGYSACIPIENLTIKCEKIEAIKRDGEYNHPIDKEIYTDYFIKGQKVLEKAIKFLYNRDEDIQLKLLFGMFYSASMQLDKTGIGYGYLSFKSHLLGFLSYRHKDMGKYKKMFQDKFTEMAETLSSFGGFIENNFKGEVPEQIPEEIIEICREWESLYSNMYQELLTAENETNTNKAFSISLSMQHRRFRSLSSFHKAAFSNANKDFFKKKEFQAYRMLVNFVYLLLPAMGLNSRKRVEASYLLVNTKEAMKIHPLTVCREKLQNNDFITTNYRKKAEMLEDIIAEEEELRNFAAEIYFEISNKILVRNSKRRKVLDCLKKLNLEYNYTSYVTDFDEINTMLEQFENRCQQLLGKKNDFSDAIENDYLNSRNILRNSIMDDTDIYNSISTVNPRIYEKMKWYLEGELRNNTETRKLELVLARIVSHAFTKTSPMGWLNKVGIIGTMNPIRYELKKNNISLNFVLLFQMYDRIILRDEYIEDVKFKLNKNFYIVDSEINIFGQRDNAQNHKLFKSRDCNVKVKNNPYFAPILNQADKNDWYFKDILELLELDKEQTGVFIRKLVEIGLFRIDSYFSDEGDVLQHFVDKLGEITKEKDDLASCVRGDFVEIQKLVKEINQEYSLDLEKRIIEIEKSACEKCGLDAGFKSREFIYKDNIVVKDKVHNLPESAQYSISKLMQLYTIFDVNTRIQQEVKMELERKMKTDSIPINNPYIFQLVANVNMKYSNFWIDPWKQITSESEIIKKLDELRTSFINELLKSAEKNEVVISEEFIDSLINQIPSELKKKKAAYSIFYEMDCDDVVINKIYPGYMSFYNRFLRYTDIIEKYRDEIKDFYKVEGENIAEIYETFGFNANSYYPIFDDRLEFDLTRNHAIDENYKEVINIYDTNLVYHDNEFLLQKDGTDYKPVICTSLMRVLYPGIITFYSSLFSNISHVSDASAIFFNQLSVDRVNVSPRIKMLNIILERQHWIINTDLIKLNQNDNVSQFTQIYSFLKENNIPTKFFIQGRKKEYNSLRITSVSVEFEKPQYIDLENMVLLKVFVNTVATSKWINISEVIPTNIGSEEFLTEFIVMMAMLIEQLKVEIKVYLRQPLYLLFSLLMPVFSFLFFGMMYGNVDYNGFSFFANYIPGFSVIILFASSVYNVGNQVVGDKEKGIYKRLSATPISLGRIMGVVVFKGFLLALLGFVIILLLAVFRFNVTLPNPVIYCVSYVVTIVYSLCLGFGAGILIDKLNTYSAAMMAFFMPMFILSDTTIPLSMMPGSFQKVAMINPLYHMTNVLRVAWDIERYSSDVKGFWFSMAFLVGLIIVAGIFVGIKWKKKKMRVNNLKKDFKDVEALKGISFEFEAPSFVGVIGHNGSGKTTMLEILMGIQTATSGTVDYSNEFELKDMKENIGVILQSNAFYSNMKVIELLRLFKSYYKDTFEINYLMDKLKITDYQNKYYDKLSGGMKQKVNLALAFINKPKVVFLDEPTTGLDPRARHDFWTVLKELCNDTLLFLSSHYMEEVQKYCDKIVYLKDGELLYAGALDKFFEQQESKDLSEIYLRISGGKDDGDVDMEDKKVLDDVFEGIEIVELDETTTLSETAASSGISSCNSCSCCLSTSCCSIHFGAMFKVERKIFHIMNQDMYNRSSESTKECINTHYQTRDTVFSIIVSVAFILIITFLSYFDNGTESDFSQIIKVINWREIAPLFILSLTIGLINYIVRLIKKSCCKTTTLCTVVANVLQIIFAYIITKQLNFWNFDYMNSTSPNVNPNIQTFYCSLFKISTVVENILLCVIIGINIAEIITAFFKQYSNKQHMDMEAGKTLTNEEVVRELLELLKKNAMKEQANDVFEICSYVDGLEKKIDSMTEELTNMQNQIKEMQEDTLVNNAKKALSEAQERLNSRCEHIKSQVLEVKEQVRSTAKGIVEKAKEKGRAALYRVSEFLGIKKRLLDIRENVRGAIKTTDKDIAKTALLAKEFREAGQTAANAFRTFADKPEVDYSQKEQKHPITKAVLAPMKAVKKMLVSMKLHLDASIDKLDNLAIDVRMDKEKHMENAKVQEQTEPERAEAERVEAEIVYSPMVAEPQEYQYNADAFEARGVDEVKQEAAHKEVSKVREDKARMKYSIKVNEVRAKEGSNIKGFATVVFGDSFKITNIAILENKDKGELFVSMPRYRSNERDESNGVIYKDVCNPITAEFREELYTNILDAYARIKEPEKEETQKQDRTREMPEFSVTVAPYEREGSNIKGLARIYFENSFIVNNINIVQGKEKIFVSMPSYKTKQVDEQGKPIYQDVCYPVTKDFREKLYNEIISEYEKAKDKSNEKARESAEKHHGNPDKEKDKEATPFRMNKRYRLGEIEEAVSEMEELIGLEDDIAEIDDDFQIVVSGWSVYVESLNLTLRQGIACVWDAEEGLFMPDFDVTIVYEGNIETQEWLYYEQDGMVVTLGNWLNGRLSCEQIEQLWCELIIPEQNKEQKESEEMSIRKVVAGLLITAGIAIMAVPFFWRATGEKQTEQLISEFEQTLEDDYDEETDVEEEQTSISKEDEAILKEGGVIGIIEIPGLDIRYPVMEGTISKVLNAGIGHIEETAGIGESGNCVLCGHNGSRYGTFFTPLNQISIGDEVMITDKKGLKHIYEVTETEVVNPYDNSIKTQGAEKELTLFTCSRKGTMRFVVRCIYKEAVMDEMNVRKIRPTSIEQREGRGIRQGNENEEVAIYRYVTKGTFDAYNWSLVENKQRFISQVMTSKAVSRSCEDIDEATLSYAEIKAVATGNPLIKEKMEIDNDVQRLKLLKASYDNQRYGLQDNFMIKYPKLIKTATEKLANVREDVKARDKELIDNPEFAITIGKATYTERVDGGTMMLEAISKCKTGETTAIGKFHGFELLVEKNFLGINYMVLRGRTEYKAELSTSPVGSMVKLENLFNGLHENIDFLEKKIEQYQNDLEASKTEYDKPFAYSKELEEKLARQCELNAQLDLENAKAVDADLSGPEEEREADDRMESAAIVAEDKGAYPADREGRTRMAKTIFEEMGGKYQRQGDYLIPCLTVPAEEEQPIGIWGQRHLDYLKHHCKVTYTNLLTSGRLNAYLADIDRQAQERFERLIEGMKQAQGITEQLKAENALEWTGCLNNIRACAREIVEKEIIFAMKIINLGILAHVDAGKTTLTESLLYTSGAIAELGSVDEGTTRTDTMNLERQRGITIQTAVTSFQWEDVKVNIIDTPGHMDFLAEVYRSLSVLDGAVLLVSAKDGIQAQTRILFHALQTMKIPTIFFINKIDQEGIDLPMVYREMKAKLSSEIIVKQKVGQHPHINVTDNDDMEQWDAVIMGNDELLEKYMSGKPFKMSELEQEENRRFQNGTLFPVYHGSAKNNLGIRQLIEVIASKFYSSTPEGQSELCGQVFKIEYSEKRRRFVYVRIYSGTLHLRDVIRISEKEKIKITEMCVPTNGELYSSDTACSGDIVILPNDVLQLNSILGNGMLLPQRKFIENPLPMLQTTIAVKKSEQREILLGALTEISDGDPLLKYYVDTTTHEIILSFLGNVQMEVICAILEEKYHVEAEIKEPTVIYMERPLRKAEYTIHIEVPPNPFWASVGLSIEPLPIGSGVQYESRVSLGYLNQSFQNAVMEGVLYGCEQGLYGWKVTDCKICFEYGLYYSPVSTPADFRLLSPIVLEQALKKAGTELLEPYLHFEIYAPQEYLSRAYHDAPRYCADIVSTQIKNDEVILKGEIPARCIQEYRNDLTYFTNGQGVCLTELKGYQPAIGKFICQPRRPNSRIDKVRHMFHKLAMVKYAPRKVFIKESGRYVELSYMDFCRRRESDQTYMDKLFIPVQGCLLEVVREQYTDFYRDKERWRYLKKLDTKNSLLSLDGFTDSEGKPLDFIADEAADIAETVVNAVMVDRLKAALPLLSDSEQELIQAIFFDGLSEREVGARFGITQSVVNKRKARILRKLRKIIENMAYNHGREDRKWRIWKEAEEKLLRECGVDEATIEQIRIADRADFNSNRRFYRWTNDVAEYLEDMADREWQTEVGTVAELLDEIESENLYQVLVAVDGRTLKIVLLKMQGYSTKEIAPLVHLTTGAIYARLDHLRKKLRKILMAYRVKAYTLREESTESSTRYFISFKDGQGKSHELEVSEQFFMEFRQMERRNRNLLQWDERHREFNEVWDETLYRRALRVPKSLDERMIEEERNETLCKAVESLPEIQRRRFLLYYEHDFNFYQIAAMEHCTASAIQKSVAIAKEKVKAEMRKYLQPMQKLQTVNAETLLYEPLEKQSFVVDSLIPTGLSLFCGSQKIGKSWLMLKLCLCVSQGLPLWDMPTMEGDVLYLCLEDTFCRIQDRLFRLTDEASGRLHFAVASCKLSDGLIVQLEDYLKDYPDSRLIVIDTLQKVRTASKDNAYASDYGDISLIKDFADRHSLAVIVVHHIRKQNDSDVFNKVSGTTGLTGSADATFVLEKEKRASDTAKLYVTGRDTPYQEYTLRFRDCRWELVERKTQEQLAKETIPDVLFRLVDFMRDKEEWIGTATELLAAMGETETIPTVITKWLNEYRTTFLSENRICYQYSRRKDGRRIALARRAGDSGDGGDSDIRIPPCYCHMPYAILRFQKRKAGGVAACERHNERKKEAYKSNPDIDMERSKNNYHLIAPPKYTYKKEINRMVAEAGCRTRKDSVMMVETLITASPEFMNQLLPEEQKAYFQTALDFISERVGKQNILSAVVHMDERTPHMHLCFVPITPDNKLSAKAILGNQKSLSEWQTAYHERMSSRWNQLERGQSSMETKRKHVPTWLYKLGGRLDKQYEEIVSALSDINAFNAGKKRDKALDLLSAWLPDVEKFSKEIGKQQAYIDSLKERIGQESDYAGRMRDEKYEQELKVQKANQKIFELQRTNEQMGRLLSKIPPEVLEELQKNHRSRAKERMKQKLKRFMAGFMAMLTLVGTLFTNGTTAFAASPQANIAFWNASVKNSGEVSELKPGFNHGKILYSILDGNSAYCMNFGLRADGGQLMNSYDDASTSMSAQQRKLLSYCLYYGFNSTQKAAPSNSQCDEYIATQAMVWVIVADIFGTGSGDSAARKLCNTAPSPDSSYSYYERLRDNISSSYNATLPSFASRRTSEAPTYELKWNEGSQRFEATLSDSNGVLSDFDFGISGYSVDKNGNSITISSTSVNTTATTGTFTSNAGKVETTSSCVFWLTGKSGYQEFISERPTADPIKAYIKVKTENIGYGELTKTDESSGVKLSGAVYGIYSDSGCTNRVQTMTTDGNGYAKSAALVAGTYYVKEITAPKGYVLSGKVHTLTVKAGQTTGISATDKEQLGAITIYKEGEVLSSWNGSNFTYEKKKLSGATFKVTAGADIYKADGTKVYSAGDVVAESLTTGTDGQVVLSDLHLGTYVVTEIKSIDGYTINTTPQTVAVEYKDQTVTVQYESTTIENTRQKADVSVVKKDSDTENPLDGGKYTLYAGNDIKNYAGQVIVTKGTALETVTTGEDGKASYSVDLPISNGYFISETQAPYAYIRNSKDVYSFNFNVLPETQAKASFSHTFANDRTTAKIHIYKVDKESGKAVAQGDASLSGAVYGLYARETINHPDGATGVMFTAGDLVATLTTDKNGEAEVNNLYLGNYYVKEITPSEGYLLDEEEHDVVCDYEGDLVAEVSRSTTSAEQVIKQPFQLIKVSDNGDDTEAGLLAGAEFTAYLKSQLACVDFQGFFLISLFLRHNRKYHIHVKPPTLAMARNTKPVPLAEKGWVITMKKISIILLSAVLVFSMAACNGGKEKADNQTEKQTESVKPTEEVAMATEVVTEVTTEAGSEETEKDIAEVKDSEEKTDKEDNRSADNETASKQEEKSEQNDKPEQKAPASGNKEAGGNQSNAGNGGQTTDSPKDNVSNSQPASVAYSPQNVVSLATAKCQAGGMITTQQNLQNHLNDGSITQEEYNEYYPYDGMEGSYYSVFVETDLNKTSTIDGQRLSSEDAIAEYIASMLLLETDSVFYISYDGVYTTGGTDYYEFRCHRMRRVMGAVGTVILEILKWILRIILGALKLVLGLARIILLLFAMVARIFLSFVRMGTFMAKQFDYEVKTTIRLNMHNPDHVLINNVIQNLDPKIFKSKNQFILDACKFYIDNYGSETFIAKKKDNERAEYIRSADIEDIKTEVIEAAINEARKEVIKLLGGVISGMNVGQPVIMQAANSEAQEPTEDVMDDADVAGLAMGWMSKGDMFKWLFKKKGCAKHMNNKLEVIGIDHGWSMMKTISQVFVTGVKEITTTPALFGDVLEYEGKFYKVGTVRQEVKDTKVEDDSFYLLTLAAVAKELKRRGIAEAKVFLAVGLPLTRFGAEKNDFIKYLTKNKRVSFKYENESYHIEIDDVAIFPQCYAAVVDKIPTMAKKTLIVDIGSWTIDIMPVINKSPDESKCVTIPKGLITCMRSINEQCVRQLNGEVDESEIQNIMLYGRSDIDDEYFAIIKAEIEDFVDKVYNSIREFGYNLKTTPIVFVGGGAVVMKNFGSHDAKNISYNLDVKANARGYEQLAMMGLKSARRLSMGTVEKRDKHKKRRFVSPEEKLERELKDCMHCRFFWGHNNRCANGTCCKPSKKKEQKLPTECVGCPYYQGNGYCFPCMRKLIGKMGFSIALIIIVLIVLYSLARTAGESDRTMEQIREQSLLGREESSGGNSMDRKMKGEKLDGNLEKGFGMLRKDNQPQRARSLSLSSKGMSNSYKFYSDTKDIMKKYVNATEGAIIYGISKSRIMVLASEAGAVYKVGNSALINTDIFEMYLEKFKEPTRPLPKHIWNKLSSEDKKDHNSTCFDKKDPMVTQLQPDVRAYLHGGEVIKRYIRVEEVAHEYGFSVEETEYIAKAAGSLYKLTRIHLVKKERFDEFMKHIYKVPGTNKQIIKKFARIGEASIIYSIGRHRFIELARAAGATYKINEGTGGTVLVNLEIFDNYMEQFRQPVRPLKEPLYGQEEGELNEMEHTKAYQEFKKNGNTKFVRYSEGAEMYHMSVSKFMQMAKNAKAIYKLGQLVLVNLKIFDEYIETFHIVDDEFYKMAQTRKDLRGRVLRKGESQRRSDERYVYTYTDPLGRRKYVYAQDLVTLREKEAQLMKDQMDGLDIYVAGKATVNFVFDRYMSLKNNLKPTTKSNYLYMYDRFIRDTFGKRNIAEIKYSDVVQFYNHLTKKQELKINTLETIHTLLHPTFQLAVRDDIIRKNPTDGVMAELKKNLGMKTGVRHALTIPQQRAFMEYIAAHPIYFHWWPIFTIFLGTGCRIGEVLGLRWEDIDYEKRIISINHNLTYYPVGEDRASENHISTPKTEAGMRTIPMLDTVKDAFEMIWEEQKENGWTDAEIDGMTGFVFCNRYGNIMNAQSVNRAIKRISSAYNATEEIEAKKEHREPVLLPDFSAHSLRHTFCTRLCERETNLKIIQSIMGHKDIQTTMDIYAEATEEKKQETFEHLAATMDVFMAKTGRPKSENVKKKVLSIRVEDSMYKRICDYAGKHKMTVTEVVLQGLERILNRPEMGYARKDVEKTKKIAKKFVRYQEGAELYSIGLTKFQELAKEAKAVYKIDKVALVNCEIFEKYLETFRIAMNFNIRMGIPEMQELWLDLQEKYRSGNIKKKEEQLYKKWGKALKLLSADPGYPSLQTHEIEPLSRRYGMKVWQSYLENKTSGAMRMYWVYGPDQKDITIIGLEPHPEDKKNGAYDRISLSDLMEAMKDYVAHLDNKKRITLRGAAYQYYNVKEYGNGCIILEPRELAVPECISARTLADMDRAVSNFKRGDVSQAIDLSDFMQYTEEQIARANQTDLVSFLNEQGEQLVKSGREYRWKKHDSVTISGNRWYRHSQSKGGYPVDFVMEFYYATFPEAVKMLIGEEGEGRQKSCPAPSKDFRLPEKNKDNEMIVKYLTESRELEKNLVMEWIVRGDIYEEKKHHNVVFIGRDADGIPRYAHCRGTGEMKYRGDVAGSDKAFGFCHRGTDNQLFVFEAAIDLLSFIQLFPKDWKKRSYLSLGGVSSVALMTFLSERPQITSVFLCLDNDQAGNEACEKLAGEISEGYSVIRLKPSRKDWNEILCDKNTDRKKAIAETITIKVPEAEELVPMLCYEDIKQTSVEWLWFPYIPFGKLTIIQGNPGEGKTYFAMMLTAACTNRKLFPNMEDIEPFNVIYQTAEDGMGDTIKPRLIEAGADLSRVMVIDDTEEALTLSDDRIEKAVRQNRVRLVIIDPVQAFIGADVDMNRANEVRPVFRKLGMIAEKTGCAIVLIGHLNKSSGTQSTYRGLGSIDIMAAVRSLIFIGKVRKDPTTRVLIHEKSSLAPPGETMAFKLGDEEGFRWVGAYEISADELLDGKEGKATETKLERGRKLIRELLADKKEISIRELDEKAKEQGISGRTMRDVRSRMKNELEYQVNEKQENSIRLKEMALYHFSVKQVSRGKGQTVVNSAAYISGQKLYNDYYGQTHDYTKKSGVVFTEILTPEYVPERLTDRETLWNEVEKVEKSKRAQLAYSFDIALQNELTLDENIELARAFCREQFVAHGMIVDLAVHEGKSKNEDEPDNPHFHVLAPIRPFTEDGRWGNKQKREYVLDEDGNRIKDAKGKDIFNAVSTTGWNDPELLKEWRRAWTEKVNEKFRECHMAARIDHRSYKEQGIDLIPTIHEGYEVRAMEKKGIKTIIGELNRAIRQFNQMFISLKESIQWMKTAYEEMKVELDRRQNPTLLESLQDYYDKKTQGRLPLPNFYAEMKRRGKNLSNLQEFAKSINYLQTHQIETMDDLKERIDELNGVVSVSKKEISEKRDQLKKLENLQKMAEVIKINQPLIDEYNRFYFQKRREKYYQQHKKEINYYRKCERELKQHLDKNGKVPTARWKREKEELRTAIEELKADKQPYQDELAFVKKVQTCADIARRDREMAEADTSGRSEEKSEKQTKFPAFHAAQTEDIFEESGKAEQQPVNQQEKKPEKKTSLLRKLDEKKKECAERDAKQQAVREKRNHEMSLMSRAKNPKYESMSLEELRANMEKSKKELEHAIHNKNILEQRKRIVERKERSHRLIVKGAEFEKAFPLSRDLEQEEVQDVMEQLQNSSYNKSIVRQVYIAALHKEQQQIAEAVERAEKGDDSMSVSYNRLWKQLIDKNMKRIEMQHLTGISANILARMGKNQYVSMETVEKICKKMDCTIDEMMEFTDMNRVILMGRLTKNPEIKYAGKDNDMAVARYTLAVNRKYKRDGEQEADFISCVTFGKSAEFAQKYLHKGMRIVIGGRISTGSYKDKDGKTIYTTDVIVEEHEFAQNKDSGAGADSSETPKTDKDGFMEAKDGENPFDMILLLDERQRKELAQYSPYIAIPKVSSQNRRYIPMDYLEGEIIPGDKLFTMPSATSYEFGILMSNVHMAWTRAVCGRLKSDYSYSNMIVYNNFPWPSPTNDQKEKIRKTAQAILNARALYTDSNLADLYDPLTMPTELLKAHKANNRAVMHAYGFSIKMSEADCVAELMRMYQKLTKEKMQLQNETIKERTPIKGLLIDWLIIFGTYLFIRVFFALFGLHQNIVILGCCLAVLPYLLGAVYLQKSHKQCPLWLSASAILIPSIVEKIAIYLFGAYLYNLSPINVLGVMEAIKSNASYTNFIKNQSAQNLINLSYLNWTYILCSIAISVLVILLLNQTKQKSNKGMKKLKIFLTYISSNRVWIITLACLDVFFIFLAWLANPDYFINYVALIIFVSFATLAIPLAISIRKRNKTDAIFRRFLLEPDDTNEYLLCEAVPAVLRPYICELGQHLRTQQEYINEQKITVTDYQHYIENWVHEIKKPLSLMTLLLDNRKDEMSPLVHTRMLYVRDHTRQDIEQILYFSRLGATHKDYFFEPLSILEICREAVEDNLTLLEEAGFSVEYTENDAQVISDKKGLMFILGQIISNSVKYTGNNPAPRLLFSIADSADNEQISLSMKDNGTSIPLSDLPFVFDKGFTGDTGSYLSRSTGMGLYLVQKMATDLSITVELKNNSCGGTTVTLTFPKVERPFGRMARIMVVEDDVYMREELTDLLRKSGYETASLFDFENAIPEITEYSPDLVLLDINLPFHSGFEICKELKAKQLGTVLVLTARDKLQDELHALGLGADDYLTKPCNIERLLARIKNLLRRKEEQIRQGLLDGNGFLLDPNTFTIYVGKSSSLMPPNEGKILLALLKKSPNLVTKHELCNVLWGTEECIDENALQVTFTRLRKTLREFGLEERIETVRGQGYRLKEQVRLMFFNLAWRNSKRSRNENLIYFLTMVTAVAAFYIVLSLGAQDVIRFLSSLESDAVERLLTNLLPTVYVCALLFVFFLVVFANKYQLECRSRELGLYLMFGMTKTRLFTQIMTEGLITSLVALLGGLICGGFLSEVISLATARLVGHGVIAHQSSFSLSAVFFTILGFLIIQCVALFILCGKLFKKEVHQLLYGEMGKKQHTGSTHGSLLSLVIGTAVLLVAYWVVIEHFMTGGGVMLLVAVLLGIVGTILFIRGIARLLSIVAASNKRKATNGLYVFTLRQLHENVVYKYISISVASILMMLTIMFIANGSATIMSHGNELTRTSAVYDFTVMGEEQNVEQYLSDDQMRVYVANLNRMETGNMKRPASGEMKSFVDWSVLRKEIVQNLPEGVIDPATQEAASYEFGSHQPAALNLLGFIDTGSVSPYMLPVSSYNRLLEAAGEKQINLENDEAVFYLNPDFLEDEQEDTVALLDRIAENAQTSGNALISIDKKSVTLVPSVPMKGLTADENVKIVTALIVSDEIYHNYVDPDTCSVYWNFCIPNEIVEANGLMLSVMEARDLLKPSGLYYESYLDNFGRQLFYLISGSYMTLYMGFMLLIIACALLALQFLTQMQSTKSRYLTLSILGARREQIKRSIYKQVLWYFLLPLMLACISGTVGLYAMQQHLYSDSTRIGQSYPLLIIMAFTVVLIMAIYGVAVARTATREIGKINYKPNSMDYTKKLLEVRDLHKAYSKEGVPTKALNGITFDVLSGEYLGIMGASGSGKTTLLNCIATVIKPTSGQILLSGANISAFDGAKLAEYRGNRIGYLFQDFALLDNLTGRENILLPLSIHNIDSSIAEKHLNDIAGFLGITDVLSKFPAQMSGGQKQRVAAARSLISNPDIILADEPTGALDTKAARLLMEKLQEVNQVQGRTILMVTHDPNAASFCSRILFIQDGVIFHELRRKVPTETREEFYARILQVMAQMGGGSANVLMSQHRHDTDIQELKTYFTSVIDWISGVFSDVESEMRGIEWGRLFETYHNQPYDPMEAGSGTMRYRIEYADGRCCNFANSRKDLLDWLKLLKDEQIVDIRKIYKSGVTDLVLDSYRRYLKMSNQRKILHDDRNGLDYVLVGDYYLPVLSLPEETRPIGYWGMLRKEYMKNYKSGMYSYLLLTGKLDSYLADLNEQAQERYELIEAQIRSAEGVTEELKACNPMEWVRQCNNVENRVQEIVLSELVYVMSGNVWMFSDEIDDEDLEFMRHDYVTYNMACEYYRLGIKPVVRMAHEAGAVYKIGKKVLIRRSIFEAYLREKRKIMGKSYKPITSMKEVPEQLRKLRRQYLRYQQAEIIYSISHKKLFELASDAGAIYRIDGTVLINRDIFDDYLERFHEPATGNDKEKKTDERMKHDEFQVKGHRFGNEVRALLRVNLRGAFLRCISKRRQWRVMANQNNNKGGQQQDVNQLLKVRREKLQNLQEAGKDPFQITKYNVTHHSSDVKELYNAHEAEILGDRKAPDVEGLDDAAKREVINNDYNERREIMDAKPIEVSIAGRMMFKRVMGKASFCNIQDLKGNIQVYVARDNIGEDSYADFKKSDIGDIYGVKGFAFRTKTGEISIHAEEITLLSKSLQILPEKFHGLTDTDTRYRQRYVDLIMNQESKEVFIKRSQILKEIRNFLAGRDFMEVETPMLVSNAGGAAARPFETHYNALNEDVKLRISLELYLKRLIVGGLERVYEIGRVFRNEGVDTRHNPEFTLMELYQAYTDYEGMMELTESMFRYLAEKVCGSTKISYNGVEIDLGKPFARMTMIDAIKKYAGVDFDQVPDDAAAKKLADEHHIEYEERHKKGDIVNLFFEEYCEKELIQPTFIMDHPIEISPLTKKKPSDPTKVERFELFCNTWEMCNAYSELNDPIDQRERFAAQDANAAAGDDEAEHTDEDFLNALEIGMPPTGGIGYGIDRLVMLLTDSQAIRDVLLFPTMKSLDADKKASKTSEAAPAEAEKTVEKIDFSKVKVEPLFEEMVDFDTFSKSDFRAVKVKACEAVKKSKKLLQFTLDDGTGTDRTILSGIHAYYEPEELVGKTLIAITNLPPRAMMGIESCGMLLSAIHEEEGEEKLHLLMVDNHIPAGAKLYMDNKKNILTYAGLKKLEDELEQLKVVKRKEVSQKIKEAREQGDLSENAEYDAAKDEQRDIEARIEEIEKILKNAEVVVEEEVDLDKISIGCKIRILDCEFDEELEYKIVGSTEANSLKGKISNESPVGKALLGKKVGDTVTVETQVGELTYKVLEIQRAEENMDIHQIRKLQIGSVTLPNNLILGPMAGVTDLPFRLLCKEQGAGLLCMEMVSAKAILYKNKNTESLLSIDEREKPVSLQMFGSDPQIMAQIAKQIEERPFDILDINMGCPVPKIVNNGEGSALMKNPILAGQIIESIVKAIDKPVTVKIRKGFDDEHVNAVELAHVAEESGASAVAVHGRTREQYYSGKADWDIIRQVKEAVSIPVIGNGDLLCAEDVIKMQEQTGCDGFMIARGAQGNPWIFSQILHYFETGEHQEKPSFEEVRRMILRHARMMIEFKGEYTGIHEMRKHTAWYTAGYPHSSRLRAAVNTVESLEQLEELLYKEKLKNMILALDVGNTNITCGVFDGDRIKASFRITTKMPRTSDEYGMLLSTLLERNQVGMDDIHDAIICSVVPNIMHSLQNGLIKYFNIRPIIVEAGIKTGIRIATPNPQQIGADRIVDAVAAYELYGGPVLVIDFGTATTYDMVDENGTFMGGITAPGIRISAKALWEDAAKLPEIEIKKPDNILGKDTITSMQAGLVYGQIGQTEYIINKVKEETGMYDAKVVVTGGLGRIISNETENVDVYDPDLTLKGINLVYRKQNRKGVKMSKEVVLCVSNAYQKKYYLNENFNGLPQTIRDELKIMCVLYTEDVGGILELVFDEDGNLDFRTSCKENDFFYDEIGSVLKIKQYRNERRELLESIETYYRIVFLGEGLEEEMKEEILRLLRSADGYISGQELCNRFGVSRTAVWKAINQLKEAGYEIEAQQNKGYKLMAAPDLMTEAEIKSLMHTDWVAKEVLYFDTIDSTNIKAQELAEKGYPSGTLVVADKQESGKGRRGRSWVSPSGTGIFMTLMIKPDINPNNASMLTLVAALAVAKAITSVTGEEAMIKWPNDIVVNSKKVCGILTEMNAQFDYINHIVVGIGINVHNESFPEEINQMASSLMIEAGGKRFHRAQIIAETMSYFEQYYDTFLKTQDLSALVREYDELLVNRNKSVRVLDPKEPFDGKAMGITPKGELIVDTWESRKLVSSGEVSVRGIYGYVMQLKGRNFLKLMDYTPEEITYLIDLSQELKEKKKKGIRHDDLTGKNIALIFEKTSTRTRCSFEVAAHDLGMHVTYLDPSGSQIGKKESIADTARVLGRMFDGIEYRGYGQEIVEELAKYAGVPVWNGLTNEFHPTQMIADMLTIREHLGRLKGVKFVYMGDARYNMGNSLMVTCAKLGMDFVACTNKKYFPNDELVKYCKDVAETTGASITLTEDVAEGTKDADVIYTDVWVSMGEPEEVWAERINDLKPYQVNAKAFENAKDSAIFMHCLPAFHDLKTTIGKQVYEKFGLSELEVTDEVFESERSVVFDEAENRMHSIKAIMRATLADMKLNKKVIESITVCGLCAMLTVTAVTNSGRSEVKAEDKVLANTGLEHTGYNSYAGVAATLFDYEKSLTAENAVTVEKENVEMVAAAQDAQPQLTQEQQEWQTKLMPNVEESLNVRAQANEQSDIVGKLYKGSVADIVENDGTWAHIKSGNVDGYVNVSYCVTGTDALSYAYDTCGEIATVNTDGLRVREAADTNSKALEVADQGKTYQVDRAAQAQDGWIAVVSDSQTGYIAADYATRSLNTRVGITIEEEQAQIAAQKEAERKAAEEKAAAEAAKAAQKNTSENTSSKKAETTQGEAVSAGADDLTLLAAIIECEAGGESYECQLAVGAAVINRVKSSSYPNSISGVIYQKGQFGPASSGKLARKLSGSISSSCYSAAQEAMSGVDNTGGCTSFNDHGSGISIGNMKFRMELSMDNMDIIAGGILAIMLALFMLTVIVTLIALSHRIRLLSNEIYKIEKQVSDYIDELSRSESDKLEIEHKVHQDGVISSVLQEIFPMKKIVMTGGGTAGHVTPNIALMPALKEAGYDIEYIGSVNGMEKGLIEAQKIPYHGISSGKLRRYFDWKNFTDPFRVLKGYGQAVSLMKKLKPDVVFSKGGFVSVPVVLAAKHCHVPAIIHESDITPGLANKIAIKGAKKVCCNFPETMKYLPADKAVLTGSPIRRELFSGVAENAIKLCNFPDHNKPVILIIGGSLGSKKVNEAVREILPELLKDFYVIHLCGKGNLDNKLAGITGYAQFEYANAELTDMFALADMAISRAGANSICELLALHKPNILIPLSAAASRGDQVLNAKSFKKQGFSYVIEEEELTKDSLLSAVKEVYGNRDKYKDAMAKSGQMDSIATIIDLINSQVKKSSMKDDNCIFCKLANGDIPTNSIYEDDDFKVILDASPATKGHVLILPKQHYANIFEIEDETLAKAAKLAKKIMTHEKDVLGCEGYNLVQNNGEVAGQTVFHFHMHLIPRYESDDNKNVIEWNHKEFTDDEMKTICDEMSMMQNIKRLDDKPYMTIGIIVVNIIVFVLMSLSGSTLDAQYMAAHGAMYPEYIKDGQYWRLLTSMFMHFGLMHILNNMVVLGAVGQIVEKAMGHVKLLITFFVSGMCGSVLSYIVMLYNNDFAVSAGASGAIFGLVGALVWIVIANRGFYEGISRQQAVFMVILMIYYGVSTQGVDNWAHGGGLAGGFVISIVLYRKKRYNKYSINMNSNEIVYERKMTGSFMKLRCDEVKPLDEKILLKNNIPGFLKMEKCYVNNEGQYWYDISGVQSLEMRCQYNDIKLEFLEKLVVSICNKMELLENHLVSTESLVLDPQLIHIKGVNQDEEIYFTAYPAQMKTICNTFQHLMEYMLTKLDHSDAEAIHIAYGIYEKTINGNYSIADIRNAIIEERQKKVAEKPVEEVVAPISQPQVRVEEPKEQIKPTLYDKLRVYLLEQLDIRLPERKKQTSAIEKPKKLDINRKWFKKEKRKENREKVDDTMLIHPSSEAAPEPVPRQIHPTVCLSDYREHPQGMLLYEGMENRSNIIIDKDCTRIGQGDEADAVIGKDTISHFHAVINRENQEFYLEDLNSTNGTFVNNEVLAYKQKKQLKSNDIIRFADVKYRFVMTGNKLNVDLSYGLKGSYTVEGAIIIPIFIVMLAIAMKMGLVLYNEMKADSSYEYATDMWLVDDFYNYQVLKEVVNEFMIQLIILLGIISIIDFSTKKIPVVVLVVMGIVGIASSFYAKQSIISVAVALIPGIVLMAAAFLTGEQIGYGDAVVVTLMGLFVTADIVCSTMVMGLTIAGTISVILIASGRAGRKKQIAFTPFLLLGYGLTEVFMMKVSFVNKVKFHIKKLYRKAKLPGDDSSQKMPSCTCLKASYTLEAAVIFPLVAGFFVFILFFFRVVQAESQVKAALYYSSRMSALASSANDSSVVSVATAEVLFRSQISDSKHIDTYVRGGKYGVSLLGSKMDGDDVALKAKYKVKLPVSFFTVDGIWIEDYSNSRKWTGKNPGEKTDPYVFYTDYGSVYHLSEQCNYLDLSIKSIKWSQVGASRNKDGRKYHACYCAADKKTKTSTVFITDYGTSYHGKLGCSKLKRTVHKVHKSEVNDKNLCSKCKGEGTMRGSITIFATMLLMLVSQFLFTVLEAGRNLTLTNIACMNSEAVAESVFAQYCRPLWDEYHLLAYDAGSDAMGNVDIENVKSYMKKLTTDNFKISDSGAFAGGTIVNGTSMLRLSMDELESMKYVLMTDDGGNVYTNAVVSYMKKNIGYETVKNLYSQYSSLNENKSAGEYDDSKIDSALNALKDNAAYEGGGKSIARSSPPRAYSAPSSVSKAKQTSESKAESTEGGNAIENPLVKVQKVKASGILSQVVDESTVSGNSIDTSARVSGRSLHKGTGGWSESSDDWYAKVLMQQYILTYMSCYTDTNPNHALNYEVEYIIGGRASDKDNLKIVIAEILALRAAANMAYLAGSASKQAQAMALAAIIGGITLTPEVIEGVEKGILAAWAFCESVLDLRALLDGDKIPLIKSDTSWTSSLYGMTSMLTGQVKAKSSNEGIGYKSYLGMLLFTKSMKNIAYRSMDVQEATVRMTGAHESFRMDNAICELSADVSYKYHGIFLCFVNLLDGADNEYTIKNKAKYSYYGRMLGFKNFLLDEYGAGVVEMILIIVVLIGLVLIFKKQLTTLVNNIFQTISREAGKVMTGGKRLRIAALFVIVLVFAFIMDMSSNAITDNTLTRNDTGDGDAVYDLVLNADGLDEDYSYQLKVREEQPSDKQANELFTQAKKEIDDSFCEENQSVEQVRGHVIMKDAYALGAVEAEWTLSDYDVVDINGDVNQDAFEEVDDEQGKLISASVELSCGEHRQLYDFSFVVFPDELDAGERLIKGINRHIDSEMSKTGTKKLTLPDEVDGVKLRWSQEKSNMAAKIAMLEVVVIVLLVLEKKEKKKTAQKERNIQLQLEYPEIVSKMAVLMGSGMTVEQAWNRITARYLDERKNNDKNIMPAYEEMLVTEREISDGVTGRKAYAGFAERVKLPCYQKLVRIILQSIHKGSKGVCEMLEKESEDAFDERRLLALKLGEEAGTKMLMPMMIMMAIVIAIVIAPAIIDFKIMLLNSYEGFDYMDYSRYSMCTKDWGIVFIKSMAATVIIAYLFYDSPIVVIAFPVVFAFCAKLCRQEGVRRQKEKLNEEFMNVLKVLSSNMLAGYSVENAWQEAEKEMELMYGNDSLMLSEIQEMNRQIKMNQTFEAVLSEFAHRSGLEDIVNFSDIFSFAKRSGGRFVDIIESTTYRMWTKYDTNRQIEVAVSAKRLEQKTMNYIPIFLLAFLKLSSRDYMSALYGNLIGVIFMSTCLLAYAGAIKLAKKFLQVGIGIMDLSRELSDEEICDLIGSVVSREARDRPMTIKDRAELERTIFNSLRKLDVLQELVDDRDVTEIMVNGPNDIFYEKAGRIQRFKGHFSSEEKLEDVIQQIVGRHNRVVNQASPIVDTRLSDGSRVNIVLNPISIGGSAVSIRKFPEHPMSMERLVEIEALSPEVARLLQILTQAKYNIFISGGTGSGKTTFLNALSQYIPDDERIITIEDSAELQLLGAKNIVRLETRNANTDGVTPITIRDLIRTALRMRPDRIIVGECRGAEALDMLQAMNTGHDGSLSTGHANSPHDIISRIETMVLQGQDFPLNAIRQQIASGIDIIVQLGRLRDKSRRVLEISEVDGFMGGEIVLHTLYRFEETAVLDSGRIQGILKKAGTLCHTDKLMAAGLSVMYTMKEQLEHLEGEIDIMLSSELDQWNNKYIPLIQIVEETPIKSEEGIYFVEKYQEVNRIVEEILKHVGGEVRDLTSEGSLIGQTRLISVYSLADNQYQMPFAMTLSSILSENEKVLLMDFQENSGLSRMLEQSVEHNLDELLVMAESGRYSTNRINSCIGRKHKLDYVYPIENTECLCEINTVICNNLLQMLGKEMHYDCIVLNMGTRFKGFFDILGRCSDIYLVQKKGGISQWREYEFTEELIERGLSNVVERIKLIEPPVITIPVSTCDKLVELWKWNEFGDVIRNMTRGISCAGMLYILLTVAAIGDLKNYRISNRLILTGLGCAFLFRLVGGKVASIIWFLPDIVFPVVILYFLYLSGILGAGDIKLFSVVCAFTNLRFTALCMAAAFVAAAGYGLISMVLKKELFVRMRDGFLYLNGILCGRFMRYRGQGKAVSFAVYVLLGTAMADIWFYGMRMKLFKETPVNDGYKTLQDDIKKTTDELQIVYTNLENVVEPDLIDYYIYQAKAVSMRYKFLLNCAKRLNEVMKNELKKTALVSEDREALRKGVSDVQAALDELMGALDFKYHLQDSFIHCTHTARGLFFSSLSLIKPHMARVTKDTMIGDLLQIDQNVAPLLLNIGMHCLGCPSSQMETIEEAAMVHGLDPDDLVVEINTFIDHDLGMKIEKVNDNQIRCTLTREDLEDRHIKISELAYGSAKAKSLFKDMVEQANYEFGFETNDIPLMVEAIPLPSESIVLIITKVEYPDELDTRFSKFSEADDDFTDLGNAGQPPVIKGAADILELFERIKKENEKTADSEQGTDDITEEQAEADVVKLFVFDKFDDVRRISHVLDGFYSGRNDLYRDASSNKYYLVAHKSEHTPKEFNKVCNIISEYAYQKNYVPANEAFFKEHGNVIIEEAAIQTLAVLMKNTNHSLFDKYEMIKDLGTGSSGSVTLVRHISMDQERALKKVPKSSAFAESALSEARLLKSLEHPSIPRIFDFEEDNAFYYIVEEYIDGETLDSFLLHQQLISPGLFFNICEQLCNVFIYLHTQISTPIIYRDLKPEHIIVCHNKLKLIDFGVSAYVIQDGNNFNHYGNIEFSAPECFTEDTITPAADIYSLGQLLQYILTFTPDSFSHKFQHIIQKATTSDASLRYVTVAELYQEIQEIQKLTGQPHLIHKIAVLGSHRGCGSTHVAVSLTCELNILGYHGIYIDSAKSVLCHGNHDGLQIFKQKNGYYYYKSFQGIPDYSDGIQFNIPKDAIQIYDLGTDVCNEKIYDMDLVLYVCNGSFWHLNDIYRNHSILKKMTASLSVICNMCSRQDASAIATLLNCSVYHFPYDSDMFKSSVQKETLIQKLLELKGGASLSDTLKGYLRKSILHHSMYRTAYVELNGTHEILSLSKTADEKVFTYKNVDFFPHAVMSTLTEILNMRYERVIIDFGILNPNTLKEFMRCDVRIAVCTISKWNRGAFNRIIELFNSNKITDSESVKILFNLVEKKKTINHKHFKYPVVGFPYLEDPFLINTSLFGTLDKISERNMKKKLLPALIVTGLIILVVIIMGITALINKYTPTKKTEDLKEYFNISSDDEVALIVDNEVSDYKAKIIDKKIYVDYKFVHDSLNSRFYWDANENVLLYTTASDIISAAADSNSYSVTKQTNDFGYPIVKATSDSALIALDYVKQYSNITFKSYDDPARIVITSKWDEIDSATVSKSTQVRVKGGIKSPILKEVKKDDKITILDSGDKWDKVATEDGVIGYIKRKALSESKKTKLTNPDYEEETFTHIKKDKDICLAWNQVTSQSANSKVPQVISSTKGINVMSPTWFYLNDNNGNLADIASKDYVSYCHSQGIEVWGLFSNLENTDVDAAYVLTHTSTRTTLINQIMSAAFNYELDGVNIDFENITEAAYGDSYIEFIRELSIKCHNNGISLSVDVTVPASFNKFFNRSDMAKFADYIVIMGYDEHYKGSDAGSVSSIPWVTEGVESTLKEVPADQIILGMPFYTRIWELTPKEDDDAVTDTEDQSKYTVASQVYSMDAAAAQLATNNATAALDEESGQNYAEWSASNKLYKVWLEDSTSLEKRLKLVDDNKLAGAAFWKLGFENSSVWDTVIKYLDMKKYMYIIKKNKYCLILALFILSFYLGRGVCALAKNTGKNTNSTVIVIDPGHGGCRMCKISKKNIFASLLAVSMIFTMMSTTVVHAQSVKDGSNEVTVTPNVGVSYVSPEETIETRGTSRPSKVWNIKSKGQYDFAGSSHYQNLYTNYKFTGKTSYKVYVENTGDNPITVTAKRLTKTYGSTKISAGKTGSFEFSNIKSDTEFYIVFEGNGYSFSGYVKMACRKDGKGRVLRKGEHYRKTDGRYSYIYTDPLGKKRTIYAKSLVTLRQKEDELVRDQMDGLNVYVAGSADVNFLFDRYISTKTELRSTTKANYLYTWDHFIRDTFGKKKIKDVKYSDVLFFYTDLITNKGLQVNTLESINTVLRPTFELAVRDDIIRRNPVDGAYAEVKKRNGGARKSRRALTVEQQREFIDYVAKNPFFFHWYPFFVFLLGTGCRIGEAIGIRWDDVDMKKRTININHSLTYYTRSDNSFKCEFRVSEPKTEAGIRTIPMMGPVYEVLKSEYQRQQEEGFCVAEVDGMTNFIFTNRFGNPHNPQAVNRAIKRIVDAHNAEEEVEAKKKKREPIMLPRFSCHIFRHTFASRFCENETNVKVIQEVMGHADVSTTMNIYAEANPEVTREALEKLAKNMDVFMAKMGRPKAEKPADKKVTIRLNGEEHELLLEYTKNHNMTMTQVVKMAVLEKLMADQKMDNRTKKTNNKRFVRYPEGAEMYSMSLSKFQQLAKDAKACYKMNRLVLVNLDILDEYLETFHIEDEEFYKMNKNKKRYDKYKKFDVVYADFGRNPHGVQGGIRPGIVVSCDASNHGGAPQISVVPLSSKLKDNPVHVIVEPSEIRGHALSNRSDFMPEDIQTLNKGCVRFKSGYIPGESEIREAMDRAMIMQLNLLPVARKMVLEELEMKQNGMRRKKKTIECIEYLSVSAPLDKVDRLEDKQSKYIHEYVKNKEYMIVGTERRHGFSQNDVDRQWHQIVDKIRKKQVDGVIVANMSVITDNLIDAFIKVAQVQAAGGIIVTVDDGRLAMQLRGFMKYDGYQVGIVIKSLRIQRKLTKEGLAAELGISESTIKKYENGERALSITNLFKIIDYFKVDANTILNVAESKKETSIDSRLELMDCSKKAYFQKIFNEMLDNAEMLVSMLTESFGRSTTENHSGRDKQVPAVKDCRFTQTAFGTVVHDSSGKWLGQYETEDAAVEMLREMAKDNGGYSDEIMNKRNFNVVENNEIDNQESAKGIAFVKSRRAELNVVQMVESMRDQAISNGVIINDAYCDRSMTRDYDREALNAFFATLKEEDFEVVVVRSLNEITDDIYDLEEFVKTITDMGIWLYSLEVGPVPITVSHAEDFGCMSSKAQAREKDYERGLRIADRRKAIGLSQDELAHRAGIGRQALSAIENGGDFKTQTLDNLAIVLGVSVDFIMYGKNEENSELLSEAMEVLSDMDELQIRQCLAMMKAMKSVSVGKMNKGNVIEIRCKKCNKLMMEYFVCGDDSAVALQNIGIKCDRCKRVMILKKYSEGMMKEHSENGTFRIMSNKVYVDVLAEFSKDGLLIPKEITWEDGRKYEITRVKDQRRAASTRAGGVGERYTCVVDGKEIFLFYEDNNMWFMERAGAMSEAARIDLVDRAPLTEKQQNVYESIMQYQRVNGYAPTIREICKMVGVASTSSVYAHLKILEEKGYIARKMDASRAIAILMADRVILHSDINCCYASIEHLHHPELAGKPLAVGGDPEARHGIVLTADYIAKKYGVKTGMALWQAKQVCPNITFVSPRMDLYLRFSRMAHEIYAEYTDMQEPYGIDECWLDVTGSSSLKGDGLLIAQEISRRMKSELGITVSVGVSFNKIFAKLGSDYKKPDAITTMYKSEFKQKAWVLPVSDLLYVGKSTNQKLARFGIKTIGDLARTDEELLNSQLGRMGSILWSFANGYDDSQVRLENTHAPVKSVGNSTTTPKDMVCDEDVKIVLYILAESVAARLRENGFRCRVVEISVRDNELFSFTRQKKIDHATNITGEIAAYAYQLFKANYHWSRPIRSVGVRGADLVTDNYWEQIDLFSSVEKREKQMKMDSAVDEIRKRFGFYSIQRGLMYRDRSLSAVNAKEEHTVHPHGYFSGMNSVGEIIATNRKRLGWSQTELAERLQGEGFNLTNKAISKWEKNDTEPSVTIFLTLCRIMGVTDIYEAYFGSNPDSLVNGLNTAGREKVLDYIELLHDSGKYKSHVCEILPFTRSIDVYETPVSAGTGNMFLDGSKATVNINSSVIPNEASYGVIVSGDSMEPEFHSGEIAWVSQQDTLCDGEIGIFGLNNEAYIKKLKRYADRLYLVSLNSKYSPIEIKESDRLDVFGKVVGKINSNDVPDYRFMIITKEVIKLKIINNLKGIRTQRKIAQKQLAMDTGYDPRTIRRVELGECCPSAEFMFEMSDYFGVPIEEIFALDKSTESVQRGKMSDAEVKDLNQISKKDIYHTPSGKYIQFIHDHSEKTFDAWELLPDGSHRLLESQSTTIGTFDEFKEKIIGKNMQTNTTRDKTIDFIKGILILFVILGHTTLGLTDMYSFDDTMNGIANVIYSFHMPCFIAVSGFLYSEYVGNASQGIFSRIGHKAFNILLPYVMISVIYWIIKFVLSNLIREPVAVSSLISIPWKPIEFLWYLYALFLIYCVAYMADYVFARLLPHFNYKMELLFVLFLIIALTCYGSFHYVGFNYIAGFQMYFYLGCLIKKWLDKLQILLERYAYSEIGGTFILIMKVFDKLMELPILRIFNPFYKKYKEMLLYLFFGGLSFIVSIATYACFNVGMGINELIANILSWIITVMFAFLTNRVWVFQSPTDSVQAFIKQMFVFYSGRVITLVVEEAILLVFITWLGFNSMLIKVIAQVIVIVLNYVISKLVVFKERSMPWVSGGNITGTTGRKLRIEGININLSQDTVHSLTGTIMYRTHVQDIGWTGWKTLGQYSGTSGRAKQVEAIEIKLTGQLATFYNIYYSSHIENYGWLGWASNGQTSGSTGISYRVEALRINLVRKGAPAPGSVANYYKNKPVYTPKPAALDVMSKNAQVRASSTRWLIMTDTSACQVGVYSGNYLFHSVLYNRGSMTHIQDGTLGKQVSHGCVRLDINNAKWLYDNIPNGTKVVIYSCGMLLSAVNNLKDSEDEELHLLMVDNHIPAGAKLYMNDLSDNPKEDGYNIVRLFLQYHPNAEADIQSKADKYSFCSDLAEKHLDEYKEPKKLAVWNIVELFSFGNFMELYELYYQMYPSFNYSDYLKSIKFIRNAAAHNNCILSTLRKPNSLKKFSKTKKLANILGKIPEFRELDNRDAMMKNPVIHDFVTLLFVYNDVMKVSATKKARNRKMEEICHLFCDEDGRIKILSIQIFCSRWLTRVLGKSRIPFIEQKSLEVFTRAVRALNMTLRNWAIGYYIVEYEQDGSDRAEYGSHLLKNLEKQIDQKGMNYTLFKACRQFYKVYPQIGSTVSSEFKLPDFGKSSTVSNEFVTDPDVLVNNLSFSHIREIMVLNDAFERFFYETECMKCNWNVRKLRRQIKTNLYVRAGIIKYTMNITSKYRSLSIQARAALWFTICSFLQKGISFITVPIFTRLMSTEEYGTYTVYLSWLQILTILTSLYLFNGVYDNAMAKYEKQRMLNFIFIRIFGYVAAGYTTLACYILYSVGHYVVSKRILVAEGIEENLMDAGFLLACSAFLIGVSVICNLLFPYRILRYAILFASAGLVFWKRELLMNTMADIRKKMSTSISIKELKELDPSSYQIVDIRDAVEISHGAIPGALAMKTEEIETSDAIDRTKKMIICCSRGRFSVAAAEEAGQEKEVHSCTEKMYRKIEETPARKIFSHLDTYNRYEKGIREIPLDSLMLLAKTYDCSLDYLAGISDQPRKYGKMIIMKEKNRFSVLLEHLTSMANLKNYVLAKAVQYDESYISKWISGKSLPTEKNHEIILQNISQCIVEALTDDNRDTFLEEYQISDVSNLQKAIYDHLESEYTYVKELQVTTGSKVATKISYYPELTLDQFILKMKHPSLRKVQSLNIYAMVDILNVDTNYQLLIAEFNSMHNDRGLVLPGVHFSLMIDLESSSDNPVYTAGFLMNLLSNLSNIDFNLYCGTQAQKKMVFAIKDIYSLSGMLVDQNHCLAVTTIEDSSLSTELYYKLKLLCSKETLLIRRTSIPEMIRTYEYEHSLFARNSSCLLGHFTEHFLPTDLHNELLDKYGSFIGKTYRPVLQKMHSLVSQILAVTPIRALIYASAFTDFTVTGELDFYGYRIQLSPEQRLHFFKHMKHLHEISNALQIKILPNGLLSDYQHIPRPTLFFADEFSYLRFRRNTPYYNICIPNKISLNRIFSAFYDTVWEFESCIAPDAYLTHAIHSVEILQSDASGDVHNMENTGATLTGKASVDKPWLQFYPEALRNVEVPTITVETFLRAKNPDENKIAFEYYGNKITWKEFWGEVDKAAKSLKILGFGEGNRIPVFLQSVPAHFILLIAAERIGAAIICRDDIPEELCFAIRKSKSETAFVMDYTSKSDEDLFRATTPMKRVIKVSPYDYADRKSVPDYVEKEIASRYTGAIETTEGDLTWDEFLALGKDYTEDYMAQEDVNRPVFGAYTSGSTGISKLVIHSSSNIVATAFQMSIFIPPSDVPEKWWLPILPPALIAVTVSMAIFPLSAGLIMVLDPFCPLEDIDIAFMEQKPNFWALIPMFCEMLMKSDRIPEDYDMSHLRSIGTGAEAMNERKTQEVEAFFHKHNVKATLSAGYGQSEDVQTLHFQIRCSRWMPMPATTMAVFSEDLEELNYGEIGELCMTGPAMMLHYAGWRGDELTERTLINHPDGNCWLHTGDKAYINEHGIVYILGRGTTKRFGGGELYMMRMETKAVRVAGVEDGFFCFVPDQDHEGYFLPYFFVILDETKSLDEVKAGLADALEEYEYPVDIRVIKERPYFHFKTNRKELTAAILEELNMSTLPFVFVLDNSYYVFCLPPPHFHCILFILHPLLYATVIRILHIFLHIIMKKRSKMLLSLFLSTIMVFSVVPSTVFAEPAHEETPAVQENTTEAVQDNTNTNEAEDPATEDSVTEDDATEATTDSSNTDNDAVAQTDNDENKVTISGITIQTPVIQFKGANAAVAEALTKDIKIDESDPAIQSLREALGDLEMVGGEAGTESNESNISTADLYEADEQAETKKLTADQINTVVGMYQQYLNQWSANANVLGVQNPFFLDFNDDTDGLGILGEMLALDGKSVQDVRDGKVSYDDLTGMIFTFTYGDKLGIKYYGPDVTNARDEALAAVTASEVHRQRHRSCLFMNSGKESDDDKPMIAKDPQKQEHEDEVYNEIYKVYEPQIKQNFHDQIYAGIEKDLLVKFYKKAIAQTLVKAGQSEEDANAYVEANKEAIEKDPEAFVKENLPDAAEPLKQEADKFIKNAEEKGVEVSEGVTMTVEQLTQQQLDSATNQAATGMTTGVINYWEGTQFGAFGMGTSVCLGYSRAFSYLVQCLDKDIYLKDPSKGYDSKKTVTADDGTTSEVCDNWKTAKELYYGSDGKTLDINAGYTVDLVRISFQSNVTMYGEEQEDFGSDHYWNAVKVDGQWYYVDPCYTDVYTEVMSRDRVETDGDMNHVFFLFSDTDARKLYQGNFSVLRSLYQNEATDTTYEKAWMARAASNVYYADGYAYYMYDSTDLFDRVSSTSMNQSQKAAEYKIVRHKLTNKDTGDGDSDYETLINFTDKKNDDDDDTFVSVLNKDGKMEKNDLLTKLYAQFVDEQSIYPSIGLTAALYTDGKIYFNVSNDIVSYNPADGAVAVVKEYNTVSAKRDTTKLFGGMAFTTTDEKSADFTVTNHPIAGLTVKGDKLVVSIGTNFAFISGKSKLLDHSSYGYEFEETDYNPTYTNYKKYQQFMGSQSNDNDEFMWSANFVDTVDMKTLTGTSHNYETVSEPAYCGRNAFTEERCSDCGLIKAGTRVEAKNTAHEHHYIKFHETYYTKTDSGSWNEADNYVCPECGACITEPVKPKYEQANSTYEKRKAIWDEAQKNAAEGHAYTATDAEWSDDHTSVTFQNLKCETCANQINKLDCLLESDENATNKANRDSIEKALAEKVTATAKLVSHTGTCDQGVTSTYKATGKTDDGYRYTASDKKTSDAGQHQYTGTWAWEPVKDDNGNVTGYTASVTGVKCSVCDDEPKAEQITVADAVKDTEKSVAATCTEKGKDVYTATATVKDAEGKTEIGTLTDTYEVELAALGHKYGAPVWNWTKGENNTYTATATFTCANDEKHVETVDAKVTEKSDGATCTEAGKITYTATVTFEGKDYKDTKTEEVAALGHDYKVSEKDGWKWTADKEKGYTAVATFVCSRCKDSHDVTADVVKEDKNSQIIYKATAKYTDETGKEFTATATKSTKMSVSYIVHCQDYGWEEEWKKDGQTSGTVGESKRLEAIQIKLPNGVSGSIEYRTHIQDIGWEKNWSKNGEKSGTEGQCKRLEAIQIRLTGEVAENYDVYYSVHAENFGWLGWAKNGEEAGTAGYGYRLEAIKIQLVTKGDKAPELIGTIKEAMKARLVGYQTHVQDYGTQAYVYDGAMAGTEGECKRMESIRMKLPSSVNSSIQYRSHVQDIGWEKNWASNGSLSGTTGQCKRLEAIQIKLSGDVAKNYDVYYRVHAQDYGWLAWAKNGESSGTEGYAKRLEAIEVRLVPKGTTPDLPASANEKAFIKKKMDLSSLTPDKQVKLQYWLDVIRQCRASGLTNQIWCEQHDIYLKSYYYWLSKIRKLALEELPRKKNGIHMCTDQQSTALTESPAEFAELSLPDRNISRSTPAAMLGELSHVEKIYIRCGYTDMRKQLNGLLDIIQYNFKLDPYSNSLFLFCGKRADRIKAVHYEGDGFCLLYKRYENGRLQWPRTGEEAKQISDQQLRWLLVVYRDWLVHIVHRLKLELLKQRYLHIDETHVQVLKEPGRSGKYPEAFLREYEGYIHTDAYSGYNAVSGVKRCLCYTHLRRAFVDALPPDQKKKERLIREKPLLEAFWSWAEKSAIGELPKSKLSKAFHYALNNREGFWNYLEDGNCSISNSLAENCIRPFVIGRKNWLFSGSPKGAEASAGIYTLFYLTLTAKAMKERLRSLQKYIEVYRCVGIDKVLKTIPCRFAYSVANEHVDEKKFHEKVLYRMRHNKYDSLRKSYNKVIKNKVNDVKQGLYQTIYLTLTIMAEDVADAKAHLVLWRVPMSQSVTIKSNKYGINLVLDADMSFADLIKAVVEKFKASANFFKNAKLAISFEGRHLSDDEQQQIIAAIEENTTIEILCIVESGTEQEAIMKEQVEAFNEAVQKQCENVATVSVPEQFYRGTLRSGQVITSESSVTIIGDVNPGAKIIAQGNIVILGALKGNVHAGCTGDRSCFVFALDMQPIQIQIGDLIAKSPDEPQPKHRVRRKEKPVQEQAQIAIAKDGYIYIEPITKNILNSIMSEVIVITSGKGGVGKTTTTANIGTGLAQLNKKVVMIDTDIGLRNLDVVMGLENRIVYNLVDVVEGKCRIRQALIKDKKYPDLCLLPSAQTRDKDAVTPEQMVELINELREEFDYILLDCPAGIEQGFKNAVAGADRALVVTTPEVSAIRDADRIVGLLEANEMKRIDLIVNRLRVDMVKRGDMMNVDDVTEILAVNLIGAVPDDEQIVISTNRGEPLVGSDSLAGKAYMNICHRIMGEEVPFLDLNQKHGVFEKLKDMFKKNMGIMDLFKKKSSGNVAKDRLKLVLVSDRANCSSEMMEMMKRDIIEVISRYMDIDAEALDVKITETESDSNNGMVPALVANIPIRDMKHRPDPRMKKFVTLFTDSARELKSVRTITTMAMLAAVAVILGYFSIEYGQFIRIGFSGIPNGIVDYLFGPVAGAVFHGALDIIKYLMKPTGPFCPQLTLVVMLAGVLYGCFFYKKKLTIWRVLAAKFVVMLICNVILNTLCLQVLYGQAFMAILPMRALKNLIMWPIDSIVFFGIAKALEQIGLFRTFRKPELIKNAMKLKDTGLTAQDIKDKVKKYMIETYERFDFIAETAEGMYLYDENGTPYLDFYAGIAVNNAGSRNPKVVAAIKDQVDDIMHTFNYPYTIPQALLAEKVCKTIGMDKIFYQNSGTEANEAMIKMARKYGIEKYGPNRYHIVTAKDGFHGRTFGAMSATGQPGNGCQVGFGPMTYGFSYAPYNDLKAFKDACTENTIAIMIEPVQGEGGVHPATPEFMKGLREFCDEKGMLLLIDEVQTGWCRTGAVMSYMNYGIKPDIVSMAKGLGGGMPIGAICATEEVSKAFSAGSHGTTFGGHPVCCAAALAEVNELLDRDLAGNAKKVGDYFAAKLEKLPHVKEVRHQGLLVGVEFDDTISGVDVKHGCFDRHMLITAIGSHIIRMVPPLIVSEEECDKAFDIIKETVESLSMAHLVITIGCEYGAKGNQIGKKVAKDLGIKFYDRDTVDEIIKEVGIPKDIMEKVEEGITIAGKGAEGDVRGSFSKYADLTERAIHVQKTIIRKLSDRESCVIIGRSADYILKEHKPILRIFIYSPDEVRIENVMKSHNLSEDDAKLFITEKDKRYHKRHMALTGSNRGDRHNRDMLIDSSLLGVDGTAELIESLARKVVENESKTEAGGDKMEQKKSEFNKVLNAWDVLVIAFGAMIGWGWVVSTGGWIEKGGVLGAAIGFVIGGIMIFFVGMTYAELTAAMPQCGGEHVFSYKAMGSTGSFICTWMIILGYVSVACFEACAFPTIITYLWPGFLKGYLYTVAGFDIYASWLIVAIVVAFLIMMINIIGAKTAAILQTVLTCIIGGAGILLIIASVINGTVDNLDGQMFAGSSAGLNVKAIIGVAALSPFYFIGFDVIPQAAEEINVPAKKIGSILILSVVLAVVFYALVIVAVGLVMGPQAIVDSEQATGLVTADAMAAAFNTKIMAKVIIVGGMCGIVTSWNSFLLGGSRAMYSMAESYMIPKFFAKLHPKHKTPINALILIGVLTMLAPFAGRKMLVWISDAGNFGCCVAYCMVALSFIILRKKKPDMPRPYKVPAYKFFGTMAVIMSGFMVAMYCIPGSGGTLIVQEWGIVLAWCALGVVFFVFCKKKYKESFGTLVELISDEDAATLMPEADEVELDKVIDAAIDRVLAKKASMETFNFSVPQDITVGKGSLSKLPEIAKKLGGKHALIISGPHLEKMGLVKKAADYLASVDIKADTFTDIEANPSVTTVEKATAKYLMDVAKAVGVVAKYGGSVTDYEGAHKVPGPIVPLIAIPTTAGTGSEVTAFSVITDHSRNYKLTVFSYEILPKYAILDAELITTAPASVAAACGIDAFIHAEEAYVSTAASPFSDALAEKAMALIGKNIRRFVANRNDIEAAEAMMTGSLFAGIAFSFARLGNVHAMSHPVSAFFDVPHGVANAVLLPVIAEYNALADHGKYLTIYNDISPIPAYADEFEPMMLVDAIRELCTDIGIPENLTIAINNASKTGTVTKEEIESKIEPMAVDAMKSGNIAVNPRTSRQCDIEMLYRRALMDYLSHNVSENLKRIRQSKGMSLDQVAEQTGVSKSMLAQIEKGTANPSIGVLGKITSGLRIEFQRLIDPPRVDYALISPDDLVPTKELLGQYRVWTCFPYEDSREVEVYRIDVEPGGVYTSGGHGEKTREYLTVTDGVLTVECHDHVQEIHRGQVYKFETDQPHLYRNDGDRVASCMCFFLDYTNIRMQTLKKFIKYYKPYKAVFFIDLLCTTIISAIDLAFPQLLRTLTKTLFAGAPGKIISALIPITIGLLVAYIIQTACRYYVTYAGHMMGARMERDMRKELFDQYEKLSFSYYDQNNSGQMMSKLVSDLFDISELAHHGPENLFISLIKIIGSFIFLFMINRMLAVPMLILVVLMLVFSYGQNKKMQETFMDNRRKIGDINSSLQDTLAGIRVVQSFANERIEQEKFNRSNENFLISKDANYRCMGSFMSGNAFFQGMMYLVTLVFGGFLIAHGRMEASDLAMYALYIGIFISPIQILVELTEMMQKGLSGFRRFLEVVETEPDIVDAADAKPLKNVKGNVCYEDVSFHYSDDDTPVLSHVSFEIPAGKSIALVGPSGSGKTTICSLLPRFYDVTEGRVTIDGNDVRKLTLESLRSQIGLVSQDVYLFGGSIKDNIAYGKPDATMDEIVDAAQKANIHDFIMELPDKYDTFVGERGTRLSGGQKQRISIARVFLKNPPVLILDEATSALDNESERFIQKSLEELAKDRTTITIAHRLSTIRNADEILVVADCGIAERGTHEELLAQDGIYARYYDMSRMQAMFIDVDGTLSSPCYKVNGKFQIGMSDVQWADYCSKHGEDTYEWCRPVMQVKEYAMKAKEKGTKLYVLTTSGTKIETAAKRRFLDRYYAGMFDDIYAVEHDDDKVRFILKKAAELGIEPSDCELVEDTYRILLQTVTEGIKSTHITTILTGGCERMEKVRYMISDAAAAVDVETHVLRYWEDELGLDVPRNELGHRYYTRDNIKQFLRIKELKEKGYQLRAIRDMLHSDAPGEPLNPPNPAAMEKSVQPVNYTNIANQTVKQEMSGYKPAYHDELPGYNHTYRSRTADERMDEFRELMSNIVGRAIALNNEELSQQISTDVQERILKEMNYLMREQDSAQEERYKKLDAAIRGNLRRKGLFSRKRNADMPADTKISAADTKGKKGRDKTHTHELNPVRLMAYVISDSCVSCGTCAGECPVGAISAGDSQYVIDADSCLDCGTCAGVCPTGAISQGMETKIIKIDQDNLDHKLMQEAGDLIAAGELVAFPTETVYGLGGDALDPEASKKIYSAKGRPSDNPLIVHISDFSDLERIAKTVPEDARKLSDAFWPGPLTMIVEKGDAVPYATTGGMDTVAVRMPNHPIALDLIRRSGCLIAAPSANTSGRPSPTEAAHVAEDLSGKIAMIIDGGPVGIGIESTIIDLTEDTPMVLRPGYITPQMLSKVLGKEVIVDPGIIAADDTRKPKAPGMKYKHYAPKADMVIVDGTRKHVIAKINELVASHRDDGKKIAVIATEETKQFYDADVVLSMGSRADEDSIAHELYRILRDCDELDVDVIFSESFSTPRIGQAIMNRMLKAAGHQVIDTHVKYDKIIFVAQTGTCREQMAKGIMNDFVLKVPMEIEARGLVVQFPEPVNQKAEAVLISNGISTEGMVSTQLEESDITESTMVFTMESSQRERIIESFADIDPEQVFVLSQYVGDELEILDPYGGTLQSYGLCYESLRATLKKLVKRLNANTMGKVVVMDHPLIQHKIGIMRRTDTGSKDFRTLVSEVAMLECYEATRDLELTDVDIETPICKATVKELKGKKLAVVPILRAGLGMVEGMLELIPAAKVGHIGMYRDPETAEPIEYYCKLPADCANREVFVVDPMLATGGSAVAALDMLKKRGVKNIHFMCIIAAPEGVKRLTEAHPDVDVYIGALDDHLNEHKYIVPGLGDAGDRIFGTKMGASEKRKDYISWDEYFMGIAMLSGMRSKDPNTQVGACIVDPEHKILSMGYNGFPLGCSDDEFTWAREGEDNKYFYSTHSELNAILNYRGGSLEGATIYVTLFPCNECAKAIIQSGIREVVYDCDKYEGTASVTASKRMLRAAGVTIRRYEHTGREVTLVLMKRDNKKEVMNALIMVFQFGINMIVPIFLCTLAGVWIGKKTGADWVTVPLFFIGAFAGANNIYRMVQKFLKSEDDGRAVRQTPGRQSTTETEKSDSISRVEKDVKKNKMLKRINDALPGLVFGIVFYGIVVQLIGVWFVTDKISYSIGLWYGIAIAVGMAVNIATVIYDATAIYGQKDANRRIVAKSLLRYIVVAVLLFILGLFDFGNLIMAFVGMLGLKISAYLQPLFMKVTDRFSGRSDASSAGEMETEMNQAILLESNADNIDFMIHGIFSIKVFGQEVWITTSHACILIVMAIMVIFAIVANRKLKKAKEVPDGFQNIIELIVEMLDKMVEGTMGKWAPRFVNYISTIFIFILMSNISGLFGLRPPTADYGTTLALALITFFMIRFNKAKHQSAKDIWTGMCSPLPPWLPIWAPINIISEIAIPISLSLRLFANVLSGTVIMALVYGLLRFIAIAWPSVLHVYFDLFSGAIQTYVFCMLTMTYVTQACETDEMDINGQDLIRACSAIGAGLAVIAGIGPGVGQGIAAGHGAAAVGRNPGARGQIMSTMLLGQAVAETTGLYGLVVALLLLFVHPLGMLAQGYTFLFNLDAQLLFDTVLLAVAVFFLFMLMSYLLFNPARKLLKDRQDRIESDINTAVADKESAAALKAEYEGKLKDIDKEAEAILTEARQKALKNQNKIVDDAKEEASRIIKRAREEAELEKKHAMDDMKQEMIQIASLMAQKAVAASITTDIQDTLVEETLKEMGESTWLSMAKLVSKVYGDALFEAALEDNRLSSLSDEVTAVKEIIAANDDLSKLMDHPQIDKEEKVRIIEEIFGGRVSAELVGLMRMIIEKNHYKELTLVFDYFLDRVKEYQNIGTAYVTSAFELSKEQKLAVEKRLLDTTKYVKFEMHFEVDTALIGGMKIRIGDRVVDSSVSSRLERLTRDLTKIQLKVGECAPMNLKPEEISSVIKEQIKRYASQLEVADVGTVIQVADGIARIHGLENAMQGELLEFPGEVYGMVLNLEEDNVGAVLLGQQRNINEGDTVKTTGRVVEVPVGDAMLGRVVNALGQPIDGKGPIQSDKYRQIERVASGVISRKSVDTPLQTGIKAIDSMVPIGRGQRELIIGDRQTGKTAIAIDTIINQKGQGVKCIYVAIGQKASTVASIVNELEEFGAMSYTTVVAATASELAPLQYIAPYSGCAIGEEWMENGQDVLIVYDDLSKHAAAYRTLSLLLKRAPGREAYPGDVFYLHSRLLERAARLSDKLGGGSLTALPIIETQAGDVSAYIPTNVISITDGQIYLETEMFNAGFRPAINAGLSVSRVGGSAQIKAMKKIAAPIRVELAQYRELAAFSQFGSELDASTAEQLAQGARIKEILKQPQYKPMPVEKQVIIIYAATKKYLIDIKIEDILRFEAELFDFIDTRYPEIPEAIREKKVMDDDTEQALIKAIEECKKQFRMASMRDIKRRKSSITSTQQITKAMKLVSTVKLQKARAHAEATDPYFNYMYRTVSSMLAKSGNLEHPYLKAGDSPRKAVVVLTSNRGLAGGYNSNIVKLITHGDFKKEELDIYAVGAKGEELLTSKGYHIVESAPEMMEDPTYEDAAALCKRVLKAFTDGQVGEIYLAYTHFKNTVTQEAKLIKLLPVELDESGADEKEDSNILMNFEPNPEEALELIIPKYVTSLFYGALVESFASENGARMQAMDSATSNAEDMISDLTLKYNRARQGSITQELTEIIAGANAIEMADKNVGKIIQVISAVLDIKFSEGNLPEINDAVEVPLKNGGKLVVEVAQHLGDDTVRCIAMGPTDGLVRGMDAIATGAPISVPVGENTLGRMFNVLGEPIDEVEPPQTEEKWAIHRPAPSFEEQATSQEMLETGIKVVDLLCPYQKGGKIGLFGGAGVGKTVLIQELIHNIATQHGGYSVFTGVGERTREGNDLYYEMKESGVIDKTTMVFGQMNEPPGARMRVALAGLTMAEYFRDRGGKDVLLFVDNIFRFTQAGSEVSALLGRMPSAVGYQPTLQTEMGALQERITSTKNGSITSVQAVYVPADDLTDPAPATTFAHLDATTVLERSIAELGIYPAVDPLASTSRILDPRIVGQEHFEVAHAVQEILQKYKELQDIIAILGMDELSEEDKLVVSRARKVQRFLSQPFFVAGQFTGLEGKYVPIAETIRGFKEILEGKHDDVPESYFLNVGSIDEVRAKMQMADNIFDIEIITPDRVFYKGETDFLEFNTQNGEIGVYKNHIPLTTVLAPGIVTIHNGDEEKIAAIHSGFAEILGDKVTFLAELAEWPDEIDIDRAQAAKERAEQRLSNHTAEIDVKRAEFALRKALIRIDVAHHMMSNRKFNLDNEVQPEIHFRLLSISASKFENDWTSFPHSHHFTEIFFIKDGTGRMLIENESLPVSSNSLVVIGAQVTHTEFSDPENPLDYYVLGVEGLKLNTDKEPEYIHVPASANSPFIRQCFENILREMHNKQDRYAEICQHYLDILILYFCRKDHVSYEVVDAQNSSHECHKVKRFIEHNYQSMISLDSLAENCSLSKYYLSHRFTELYGKSPIAYLNEVRLASARDLLLTTNHSIEEIAGCIGFSSTSYFSQSFQKNFHESPQQFRKSHRVRTMLNSVFVTALALVILLIVALSAAYCLSRFKFKGSKFLNAAFMGGLFINVNYIVVPIFLMLRDGDNWLKSVIGKSFLLNNLVILAIVYAATALPFTIYLLSGYFSTLAHDYEEAAYIDGAGYSTTMWKIIFPMAKPSIITVILFNFLSFWNDCWWFKGLMRREIKMEFGKKHTKCRIILMAALFIAGISLSVFRWGMTGKITGLGIMLIGIICLLMALWIYNCPFAEKKKRMMSEKNTGRVTIPTNLDVVPETIELMKRWGADAIRDCDGTEFPEELTKTGAKIYATYYTTRKDNEWAKANPDEVQQCYIMSGFYTAVESELQIPLMKGISEELMQVNTRDDIKRWWEVIDRSTGQVVSTAQWEYNGESGCVCIHEAEPFHEYTVSFLAYIIWDPVHMYNAVTNDWKDFEHQITFDVRQPKTHKYSMERLRKFCAEHPYVNVIRYTTFFHQFTLMFDELKREKYVDWYGYSASVSPYILEQFEKEAGYKFRPEYIIDQGYYNNQYRVPSKEYKDFLAFQRREVAKLAKEMVDITHECGKEAMMFLGDHWIGTEPFMEEFATIGLDAVVGSVGNGSTLRLISDIEGVKYTEGRFLPYFFPDTFHEGGDPVKEAKENWVTARRAILRKPIDRIGYGGYLKLALDFPEFLDYVESVCNEFRELYENAKGTTPYCVKKVAVLNSWGKIRSWGCHMVHHALYQKQNYSYAGIIEALSGAPFDVKFISFDDILKDKNILKDIDVIINVGDGDTAHTGGAVWENPVISAAIREFVYQGGGFIGVGEPAGHQYQGHYLQLADLIGVEKETGFTLNYDKYNWEEHKNHFILADTTKPVDFGEGKKNMFAYEGTEILVQRDKEVQMAVNEFGEGRSVYISGLPYSFENSRILYRSILWSTHGESLLHQWFSTNFNVEVHAYVKNGKFCVVNNTYEPQNTVIYRGDGSSFALKMEANEIKWYAVMKVRYAFQKLENLPEGFEVPAGRVKPWGTAHAILSCKDMIDGPFAVINADDYYGREAFKQIYDYLSVHEDNEKYQYAMVGYQLKNTLTENGSVARGVCDIDSNGKLVSVTEHTTIVKRGDNAAYTEDDGKSYTDLAGDTIVSMNLWGFSKGFLSEIAYGFRDFLQEGLQHNPLKCEYYLPSVVSRLLDSNKAEVKVLLTTEKWYGVTYREDKPMVMAALKKLEENNFYPKQLCGKLEAAANFCFEGVYKEEIPWGNGHINDTYRVTFENEQGVKKHYILQQMNKSIFKNPVELMENTVSYDLIDNPEILYEGGLAFGRLQSMLADYPAKTLHETIPGFHDTRERFETFKKAVEEDVMIDLDTVMPGAAMNDFGDAVRIGASTALEDEQNLDKVWCDLELFEACAKGFIEGCGGKLSQEEIKLLPMGARLMTYECGMRFLMDYIQGDIYFKIHRPGQNLDRARTQFKLVSDMEHKWKVMENIVKKYMMFLLYHNDTIMKNEKIVHGLYAKNNKKVYLEKATCICYNGGSMIEIICGDKGKGKTKELLDKVNSSIKGNEGSIVFLDKSQKHMYELNNQVRLINVMDYPIDNCDEFLGFICGIISQDHDLEEMYLDSFLTIASLDDEGDITKAIEKLDIISEKFKVKFILSVSRNIDKLPECAKAKVIISLMSRKNKKVLKYHTGFNLNIGFIVFFVIIIYVIFHIFTYFTSNPVSEYEVQQGTIATNNIYKGMIIREESVVYAEESGNLNYFVSNGSKVATSDVVYSVDTDGSIATQITGAQNDASAITDEAAGQIITDINSFSSGYNRRYFSKVYTFKNDLSAQLTQVLSQNALTSLADTISTAEANNTFYTYKPTAPGIVYYGIDGYEDVTTDSFTLDQYNNTNYEETDLTDNSTINQLDPVYKLITSENWNILINVPDNVAKSLNDKSVIKIRFCDDDYTTTVSFSLLKKDDAFFLKLNMKNSLIRYINERFTNIELVLGTDTGLKIPNSAITKKEFFTIPKDYFTASGDSDDSSLMIKDKSSGSVTIVSPTIFSQNDDFYFVDDEYLKDGDIIVKPDSSSTYRVGTDKDKLTGVYNINKGYAVFKQIKVLASNDDYTIVEAKTPYGISLYDHIALDGKSVKENQTITKMLKDNLHQVQQNIKAACDRAHRNYSDVTLIAVSKTKPVEMLSEIYDEGIREFGENKVQEMCEKMEVMPKDIHWHMIGHLQTNKVKYIVGKTSLIHSVDSLHLAKEIQKQAIKHDCSCDILVEVNIAGEESKFGTSRDEAISLVEEIAKLDHIHIKGLMTIAPFVDDPEDNRQYFRDIKQLSVDIAQKNIDNVSMNVLSMGMTGDYTVAIEEGATMVRVGTGIFGERDYSNANMSFIDKILDKMSLNSEDDEEFDNEDYYLDDEEEEELPRNPFRRKKEAVEEETAIKSTRRDTTPKEKPVKTTSKITPISKSSRKQVASDMEVCVIKPSSIEDEIEITDTLLNGRTVVINMEGLNVDVAQRIIDFTSGSAYALHGNLQKISNFIFIATPHGVDISGDIQSLMDSFDLPGSSYMKKNKTKKQMCTAGIIALILVAIDQLTKYLAVINLKQSSTGVFVLIPGVFEFRYLENQSAAFGVDLLSIIQNIFHFTYWSENPLAFLRAKMIFFSVITIAVVILLCVWYRKIPVSKRFRLLNVVVILFVAGALGNLIDRIVNNYVVDFFYFSLINFPIFNVADIYVTVAAFMFIILGLFYYKEEDFSLIFPDKKHENRMNRDTFEVQSEQEGERLDKYLSSIYPDISRSFFQRILKENQILVNDKPQKANYRLKTDDIVDVTIPDAVQTPILPQDIPLDILYEDDDVLVVNKPKGMVVHPSAGHYSDTLVNAIMYHCKDSLSGINGEIRPGIVHRIDMDTTGSLIVCKNDESHIKISEQIKDHSCNRIYVGIVCGNVKDDEGTIEGAIGRNPNDRKKMAINEKNGKPAVTHYKVLERFGDYTYMQFKLETGRTHQIRVHMASINHPLLGDMLYSSYSPTKNRFKGLEGQCLHAKTIGFVHPKTGEYMEFDAPLPKYFANLLEVLYNINNKMGSNEIYTIGREFGSLGKQVGQELAKRLGIKFYDKELLQKAAKESGLCEEIFESHDEKPTNSFLYSLVMDTYTGGSYSTAPFLDMPLNHKVFLAQFDAIKKIAANESCVIVGRCADYALADEPHCLNIFIRSNMDDRIKRISERLNVPENKAKDIIKKKDKERSSYYNYYTSKKWGDARSYDLCLNTSQISVEDSIELILKYRECMRNHNKMYLEKINGPEDVKKIKIDELPVLAQEIRDALLVRASKHGGHFGPNFGMVEATIALHYVFESPKDKIVYDVSHQSYPHKMLTGRKEAYLSEQHYDDVSGYTNPNESEHDFFTVGHTSTSVSLAAGLAKARDLKGENGNVIAVIGDGSLSGGEALEGLDFAAELQSNFIIIVNDNDMSIAENHGGLYQNLALLRKTDGQAECNLFKAMGLDYVYVDRGNDVAALIKAFKEVKDSTKPVVVHINTLKGKGYAPAEKCKEQWHYSGPFDIETGKPLFDNVEEDYSSVTCEYLLEKMKNDSSVVAITSGTPTVMGFTEDKRKEAGSQFVDVGIAEETAVALASGIAVNGGKPFYGVYSSFVQRTFDQVSQDVCINNSPITMVIYQGSVYGMNDVTHLGFQDIPMLSNIPNLVYLAPATKEEYLAMLDWSMEQTSYPVAIKLPGGPMISDGSSVTKDFGRLNRYEVAQTGEKIAIIGLGTFFELAKEAAKLLKEEAKINATVINPYYITGLDEALLTKLKQNHDTVITLEDGILDGGFGEKIARFYGASNMKVMNYGLKKEFLDRYDVDAVLKENHLTAEQIVEDVLSISMTIKEVSERFGVSTDTLRYYERIGLIPPVARTSGGIRDYTESDISWVEHTICMRNAGVPIEALIEYIRLFQMGDATFEARCQLLKEQYEQLDEQKKQIENTMERLQYKISKYENAIKTGELTWDKMNYTECIENARPRLGKYCKACPECNGRACKNQMPGPGSKGIGDTAIRNYDKWKQIRVNMDTIAENKPVDTSLTLFGRTFKYPVFAGPVGAVQLHYGDCLDDVTYNDILVSACAKNGIAAFTGDGTDPNVMVAATKAIKNADGAGIPTVKPWNIETIREKMKLVHESGAFAVAMDIDAAGLPFLKNLDPPAGSKTVSELCDIIQMAGTPFIIKGIMTVKGALKAKEAGASAIIVSNHGGRVLDQCPATAEVLESIVKALEGSGIKILVDGGIRSGTDVFKALALGADGVLIARPFVTAVYGGKADGVRAYIDKIGTELEDTMKMCGVSSLDEITRDCVMTFMHISILLMEQIIELFIMIFMGFIIVKTGIVKDDDSKVLSKIVLYLIIPCVIINAFQVNYTSKTVRGLLIAFAASVILQLVLLFIISVMGRLFHMNEVEVASVYYSNSGNLIVPIVTFILGQEWVLYGCAFMSVQLVFLWTHCKKIISRENSYDWRKIVLNINMISIVIGVVLFFTRIHLPQLINDTIGSVGSMIGPASMIVTGMLFAGMDLKKVFANRRVYFVTFLRMLLVPLISLILIKISHMAYLSADAPKIMLIVFLAVITPSASTVTQMCQVYGNDSRYASAINVVTTLCAVVTMPVMVLLYEEFIMSILNVEHLSHGFGDRAIFEDVSFRLLKGEHIGLVGANGEGKSTFMNIITGRLMPDEGKIEWAKKVRVGYLDQHTALEKGMTIGSVLSSAFDFLYDMENEMNDIYARLGDVDEDEMNKLMEEAGTIQDMLTMHDFYMIDAKVEEVARALGLLDLGLDKDVTDLSGGQRTKVLMGKLLLEKPDILLLDEPTNYLDVEHIEWLKRYLNDYENAFILISHDIPFLNSVVNLIYHMDNKKLDRYVGDYDKFMEVYEMKKAQLEAAYNKQQQEIKELKDFVARNKARVATRNMAMSRQKKLDKMDVIELAAEKPKPEFNFKTARTPGRYIFQTNGLVIGYDDPLSSALDLEMERGQKIVLTGANGIGKTTLLKSILGLIKPLSGSVTLGDYLEIGYFEQEMDQSVTTTCIEEIWNEFPAFSQYEVRSALAKCGLTTKHIESQVRVLSGGEQAKVRLCKLINRETNILLLDEPTNHLDVDAKDELKRALKEYKGSILMVCHEPDFYDGLATDVWDCSKWTTRLMNSDIMKNVDTIHNAIANNSSLSFQYCRWNTKKELEVKHDGARYHVSPWGLLWNDGNYYLIGYDHDTQVKEIHHYRVDKMKNILIENKAREGREKLKKLDIASYGKSKFGMYNGEEIKAEILCKNSAIGVLIDRFGTDVTILKNDEAHSRVFVKVADNKLFIHWIMVMGDNFKIIGPENLVKEVHDELNRLAKQYELADMSEAENNELTAGKQSKEPRSNQKLKLLYLAKILFNNTDANHDITLDEILNKLHTYDVTAARKSLYDDIAQLNDFGIKTQKTQYGRTVHYKVIGRAFELAELKLLVDSVAAAKFITEEKSNELIKKLESLTSRMNFLFVALGGAVGAMARYAISLIPLKTEFPFLTLITNIIGAILIGFIVGITSARDGVSKNMVLFWKTGVCGGFTTFSTFSLESYNLFEHNHCLLGCGYVLLSCLGCILGVMCGEKLAAIIKMSKVLEEMKTRRSIRKFKPDMIPQDILDRIIEAGTFAANGRGAQNTIIIQVTNKEIRDEIAKRNADIMGSNTDPFYGAPVILIVLGKKDWPTHVYDGSLVMGNLMLAAHDLGIGSCWIHRAKEEFESDWGKKLLKSLGIEDEYEGIGHCALGYVDGDYPDVIPRKENRVFYIMADFKYEIVEHIGNLSESAKGWTKELNRISWNGGEPKYDIRDWAPDHEKMGKGVTLSEDEMLKLKELLMAKRITFQFEDDLDYQMQAIHSTVELFRGLSRHVDGIYRPNRIRKVGEGDPVRNNDIVVGSRLLENLRKVQLSNDLFADNVLADGNNFTIEMETGTGKTYVYLRTILELYQEYGFRKFMIVVPSIAIRKGVEKSMEQLADHFKRLYNIDIGKHSFIYDSKNPKQISSKLVESNDLSICVLNIQAFNKDTNILRKTDEYEQNLWEDIKYIKPIVIIDEPQKIEGTKKKKSKSLVAIEELKPLFTLRYSATHKQLYNQIYKLDSFAAYQKDLVKKIVVKTVYGVIPKDYPYIRYLAFTSDLKAKIEIFSQDQGGTIRFKNFNVGGGASLEELSGGLSQYKDYRIAEEPHKLKPLSVATEEGFFGLELGHSNHEIEKNEAVRIQIRLAIQNHFTKQLNIIRSGRKIKALTLFFIDAVDKVRDDSAPDGRGEYLRIFDEEYKKYVTTHTHELEMNKEYFPDYMNVQAVREGYFARDKKNNAVDVEGWDSSVDDSDVKLKAKSQEDIDRGISLILEKKDELISFEEPLAFIFSHSALREGWDNPNVFTLCTLKAGGSDIAKKQEIGRGLRLPVDNTGNRCIDRRINELTVIANDYYDHFASALQKDFNDNMHFVKDEVTADILIETLKSAGIPEEKISPKLVDTLKEELVSVGVMNTDNVLKGSSQQITKTLDNMVFVDDTLNEHAQLIKQQFKELMVQKGTRKIEITNGDNAPYDNGVRAYVTQGEFEKIYLGLRKNLMQRSIYKFKIDKDKFIDDCIFQINQSLLFKKAKNEYKVETGRAKFNTSQMFVMEELAYGDKELEVEITSDAKSDFEIANFIMYHTMLPRLAIFKILQGVTKRELLNNQDILDEVTQLIKGILNDTKASNITSYEVINGYELDERNIFELDTITEADFEQEWRVFKAKSDRSSAMNEYYKLDSEGESKFAHKLENNENVLLFTKLKKGGFVIDTPYGNYSPDWAVVCRREALKDPSIGIYFIVETKAGKTWADLTDVEKNKIHCGELHFKAVSDDTKFDWVNGYEDFVNKFGVVDSNKEDLMDNKVPQQINDIVGDNVKKLAQLFPSAVKDGEVDFEALKEELGQYEEVGSEKYELTWAGKKNAKRIAQEDVIGRTLKFIPEDSKEADTTENLYIEGDNLEVLKLFRQNYYGAIKMIYIDPPYNTGNDFIYNDSFEMEQEESDIAEGVRNEVGERYIVNTKSDNRYHANWMNMIYPRLMIAKDLLTDDGAIFISIDDNEIDNVLKICNEIFGEINYVAIFPWRKRTAKSDVPYGISQDFEWILCYAKTTNFKCSIDGKERKYFTTEDFPEKPWRIHDLTKQTTASERPNSFFTIKNPKNGSEYPANPNRTWAITQETFEQYYQDNRIVFPGDYSFLNISKPALRYWKEDDMRKAGDNFGKIAVSTKLPDDIGMSQDGTKEITNLFSGKIFPFPKPTSLVKFLCKICTGKDDIILDFFSGSSTTAQSVMELNYEDNANRKFIMIQLSELLDKSSEAHKLGYINLCQLGKERIRRAGDKIKSEHPEADIDIGFKVFRTADTNIKWNSLMDMGQVDMNQLEYTPDLVDFMPDANDVDVVYELMLRQRDVALSETLEQLSDIGSRTYLYASSYLVCLETQITEELVGKLAELDPLPIKFIFRDSAFKDDIALKDETFRRLKALIEKNAGTNKPTYTVEFIMENSIKPIEIDDDYADILKIKEQYAYRFGYTRPKEDLIAFKNRTIAAIASTIYDEYDLQFYTRKIFELLGYPYTGVKEWGFDGSLLHQALGTVKIEKDKSILYIWFQILEFVANSITRADDCSRQYAFVQKIAIALKLSGINAVICIDGEEYKFFPYSEAFFDKPMVVDVINWLSTYEKAQNQYRQALNDMLKGKYDRQVVDSLRLALELFLKQFLGNDKSLENQVKDLGVYLKNKNLSSEVSNMFFKLIDCYAKYNNSHAKHDDSVDENELDFLLYLTGSFIRFLYKINNKNMIVADSMTIFINKSAVYADEGNLVVISSDKQQLKKGDILTYSLDMQTNEDVMAAMLTIKYDDEKLEPLYAQSDIEKSIQPGSVLNSSTSDYNIDSDGNIKIVMVSNSDKIATGNIDINVEKCETCNNEILSNSTIVLNKASVLIRTEKTETSEDKISLAERMKINKEIKTEVQALDNEELWEVYFWKIVLSQMKLQKLYSKVRQALDDYNMITENDKIAIGVSGGKDSLTLLYALSGIRSFYPVPFELVAIAVDLGYEDFDLEPVKALCDELSVEFYVVKTDIGRISLEKSKNQASPCSWCAKLRKGALNDFALSVGCNKIAYAHHMDDIIETMFLSLLYEGQFYSFAPVTQLDGSGLAIIRPLMYVGESDVKGFKNKYNLPVCKNPCPYDGHTRREYVKQLVRQLNIENPGVKKRLFSAIQNGNIDDWVKCTKPSDASMDYLINILCAVIVLHSISHGSCDRYYIISISDTSEIIHHFRDIAYVHFIFPMRFVIQRVNHAKCTIDGNITGSIEKGLCVLIGIAETDTKEIADKMIKKLINMRIFADENDKTNLSINDVDGKLLLISQFTLYANCKKGNRPSFVEAGSPDMANELYEYCISECDKAVPGVQRGVFGADMKIELENDGPFTIVLDSDKLMNYNIEGEPLPVVICNLEANETMITEKGAMSWMTPNMKMETTSNGGIGKMFGRAFSGESMFQNRYTSMGGPGMIAFASCFPGCIRPFQIAPGQEIIAQKSAFLASTSGVELSVFLQKRIGAGFFGGEGFIMQRLSGNGLAFLEFDGHIKEYELTPGQQLVIDTGYLAAMTGSCQLEIQTVPGIKNAVFGGEGLFNTVVTGPGRVWLQSMPVSQLAGAIRPFIPTGNMILTEKETNAIEDLKTQEQACIEKYTKYSNQAKDPVLKELFEEIARDEQKHFDSLDQVIKGKVPSVDCNDSKGKNYNPAATYDSLGNSEDKKADCYLATDCIGTEKLVSGEYNSDVFVFGNSDIRKLLADIQIEEQNHAEMLWKYKTANGMAMSNTGIYNANTHNTDQNIYSRQNFKQYHTNKSNICGISDDKTDCSRQSAFCDSTNYADLPLGCVCEGTEVRNSADENVKIYNIKHSHQPIMSDNIITITDFMDPNLDVYARLTENQLLNRANPKEGMFIAESPKVIERALDAGCEPVSLLMETKHVNGEARGIIERCQNIPVYTASFDLLTKLTGFALTRGTLCAMYRPKPRSVEEVCRDARRVAVLEDVVNPTNVGAIFRSAAALHMDAVLLTPACSNPLYRRAIRVSMGTVFQVPWAYFSKYNVGSDNTFSDASLHDKCDSSAQNCSDRNSSVYKYYIDVLHKLGFKTCAMALTDDSVSIDDPVLHSEERLAIVLGTEGDGLHEQTIDSCDYTVKIPMSHGVDSLNVAAASAVAFWELAKMKDKAYYEDVNIKNELKLRDMIQKLPKFCMDFFIGIDADKSSRTKIAYAYDLQTFFEYMKSANPSLKKYDIRDYPISLLDQISPSDIEEYLFYLKYYEKDGVVHTNDERGIKRKLASLRTFYNFYFRKEFIDTNPASKVTLPKIHEKNIIRLDTDEVAQLLDEVESGDSLSKNQQRFHEKTKVRDLALMTLLLGTGIRVSECVGLDMDDVDFKNNGIKVHRKGGADVIVYFGDEVRDALLSYWEERSIITPAEGHANALFLSLQRKRISVRSVENLVKKYSRLVTTVKNITPHKLRSTYGTTLYQETGDIYLVADVLGHKDVNTTRKHYAAQEDSRRRAAARVVHLREDMLKLFFVIFANFHRAPYIVPKMRYMADHPQKYSEAERYDMMRHCIDLMNKSGKITTEAYGLENLPETGGYIMYPNHQGKYDLLGIITTHDKVLSFVMDKQKSHTMLVREFVDLVQAKRLEKDNPRQGLTIINEVAKDVKNGKRYVLFPEGGYKFNNKNKVQDFKAGSFKIALKSHVPIIPIALIDSYKVFNSFHFGPVTTQVHYLKPIEYDEYKDMKTKDIAALVKERIEEKIKEILGMRENTLSGRRKMFGWTAVAFIAAVIILCGTIHIFASSGDSRPYNKYYTSVRVEEGDTVWSIADRYIADSQVSKRDYVDEICRLNSLTDGNVRSGDYIVVSYYSQDIKMALEKISDKQKEILEFIKSEILNRGYPPSVRDICEGVHLKSTSSVHAHLETLERKGYIRRDPAKNRAIEIIDDSFGLQRREMVNVPLVGRVAAGEPILAVENIETYFPVPAEYMPNKQSFMLKVKGESMINAGIFDGDNILVEQQSDASNGDMVVALIDDSATVKTYYKENGHIRLQPENDTMDPIIVPDCEILGKVFGVFRFFMQTIDLVKKIVEALEDKKAEDITVLDIGEVSSIADYFIIANGNNANQLTAMEDAVDEAMYTNGVHQKQVEGTGNSTWILMDYQDIIVHLFSKEDRQFYDLDRIWRDGKVVDVHSLMEVKEIKKKLKKSLDKQRYQHTLGVMYTAGCLAMANGYSIEKAMLAGLLHDCAKCLSTEKKIGLCVKKNIDITEVEISNPGLLHAKAGMVLAEEEYGIKDAQILHAIRVHTTGEADMGLLDKILFVADYIEPNRCEAPRLEEIRKLAFSDLDRTVAEILYDTINFLNTKSGAIDPTTQITYNYYAKYRDNREEMKTGIFGGAFDPIHKGHIYMAQKAMEEYSLDRILLVPSGHSPNKTENAMTAFSHRYNMCKLASEAVPGIEVSDIEIKDESTSYTYVTLQKLKALYPEDELYFIMGGDSLDYFESWMKPEIIAQTAIILVMVRENFPKQQMEEKIAHIKKQFWADIRLLKCDKMDVSSTQVRRLLRAKSQADGYRSPKGAEMFLDAAVMSYIQANNLYRMNLSSKQRAYLSSLASTINPIFNIGKASLTPEIIEALDAALEKRELIKVAVLKNCIDDPREIASVIGERTHSAVVKVIGKKMIFYRPAKKNPKIKLPEMFADRAKIIIKSGKGGDGHVSFRREKYVPNGGPDGGDGGKGGDVIFLVDKGINTLTDYRHRRKFAAEPGQEGGKKNCHGKNGEDLILKVPEGTLIKDAASGKVIADMSGDNTRQVILHGGKGGQGNQHYATSTMQAPKYAQPGQDAIEIEVQLELKVIADVGLVGFPNVGKSTLLSRVTNAQPKIANYHFTTLQPNLGVVDMDEGFGFVIADIPGLIEGASEGIGLGHEFLRHIERTKVMIHMVDAAGTEGRDPVADIKAINKELEAYNPQLLKKPQVIAANKIDAIAGDENEVISALRAEFEPQGIKVFPISAVSGKGLKELLYEVKNLLANCPKEVTVYEPEIDPALSFFKDEPYAVEVAADGAYEISGPKIEKMLGYTNMDSEKGFAFFQRFLREQGIIKELENMGIEDGDTVRMYDFEFDYYKMLNMNLQFFAHKKGVGSTKNGRDSESKRLGAKRADGQFVKAGNILYRQRGTKIHPGTNVGIGGDDTLYAKVDGVLRFERVGRDKKQASVYPVVNEMIAITVYQNSKGHKMGFKSKGHAGFADSGYDIICAGVSALVINFINSAEELCHAKYSLDTDEETGMIDYRLDKPATGDVALLMDSMILGLKGIQRDYGNEYIILDFKEVMYAIIATGGKQYKVSEGDIITIEKLGVEAGEKVTFDQVLVVGGDDLKVGDPTVAGATVEASVVKEGRAKKVIVYKYKRKTGYHKKNGHRQAFTQVKIEKINGMNRIILTKTVKNNNTYTVYALMDENGNYKDFQLLPEKDTIINNIYAARVNKILPGINAAFVTIAQNKSCYLSLNDAKNPVYTNKKSKKAGLCEGDEILVQVIKDALKTKDPVVTTKLSIFGSNVILTNFDTQIGVSSKLDKERAALLRKAVLSKCADHEKEGYGIIVRTNAKNVEDKAVSQDAYSVAQKYNQIIKKAPHQTLYSCVYHGMSDYLLLMKTIDFATVEWIKTDCDDIYDSLLTEYGIYDHAPEKIMRYDDSAISLSTLYGIRGLIDNLTSRRVWLDCGGNIIIEQLETLTFIDVNSAKNISSGSNSILKTNMEAAKEIARQLRLRNISGMIIIDFINMKSEASKDTLIEALKRYIKDDNTVCTFVDITKLGLVELTRKKVHKSLKQILEKTLDEMKIRVKFKKWGCMKFIGHLDMMRYFQKAVRRADIDIRYSEGYSAHQIMSFAAPLGVGITSDGEYFDIDVNTTESTEKSIQALNAQMVDGVEVTGYVLLPDDAKKAMSLVAAADYVLSFKDGYESPYTIEEWKEAIDKHFFDEPSFVVMKKTKKSEREVDIKPLVYKLTVMENNKKPEFFMQVSTGSIDNIKPEFVLHAIYEKCGLDYNPLAIQIHRQEVYARKDDGTLICLLDMGEEISMRKLALSDEILMKVDKPARYIGNEFNSVMKDTSQVNIRFAMCFPDVYEIGMSHLGIQILYDMFNRMDDVWCERVYSPWPDLHEIMKQENIPLFGLESQEPIKNFDFVAMTLQYEMCYTNILQILDLAQIPLRSRDRAEGCPIVIAGGPCTYNPEPIADFFDIFYIGEGETQYGNLFELYKKAKADGLSREEFLHEAAKIEGLYVPALYEVEYNEDGTICCMKPKYDDIPVKIKKQVQVDLTNSTYPEAPVVPFIKATQDRMVLEIQRGCIRGCRFCQAGMIYRPNREKKVDHLKDVAAALIKNTGHEEISLSSLSSSDYKELDELITFLLDICKEKKINISLPSLRIDAFSLDIMQKVQDVKKSSLTFAPEAGTQRLRNVINKGLTVDDIMNGSKQAFEGGWNKVKFYFMLGLPTETEEDMRGIPELANDVAALYYDTVPKEKRAGKCQITISTSFFVPKPFTPFQWARMYEPSEYLGRAKIVNDHVKEQLNRKSIRYNWHEAYVTVIEGILARGDRRLCDAIVKVYEKGGYYDAWTEYFDYDRWIDSIKECGLDPDFYTMRERPLDEVFPWDFIDIGVTKQFMIREWETAHKETVTPNCRMRCSACGAKSYGGGVCYENMTGFKNIVATLYLKNGQAVKSASDMTVMGDVYNLCQLYNDSGIDKIIIFDLSTDDDEHEKNIHTIENINRNIDIKVCAGGNINRIEDVKKLLYAGCLQVIFNATKDSSLELANVASEKFGKDKILLSISNVDYIFKHQEEIEDTFHELLVLNIDIIDALENLTSTPYVVYMPQFDMDKIIDVMKRETLRGIAGEFINDPENDIMAIKTKLSDGGILVDNFTPDLKWSDLKLNSDGMVPVIVQDYRNEQVLMLAYMNEEAFNVTINSGRMTYWSRSRNELWTKGLTSGHLQYVKSLTADCDYDTILAKVSQVGAACHTGNRTCFFNNIVKKEYVEKNPLTVLESVYAVIVDRMKNPKEDSYTNAVMEKGIDEILKKLGHECTEIILAAKNPDSDDLKFEISDFMYHCMILMAQKNITWAEIAGELAQRMADRCAKLSRKTKETDISVGLNIDGTGKSNIDTGIGFFNHMLEGFSKHGFFDLDMTCDGDLNVDCHHTIEDCGIVLGNAIAQAVGDKKGIKRFGSFILPMDEVLVLCAIDLSGRPYLQFDGEFTCERVGDMDTEMVREFFYAVSYSAAMNLHIKVLTPGNNHHMIEAMFKAFAKALDDACTYDSRIKDVMSTKGSLMRTLKLTKDSQKNILESLLKRSPNNYTEYESTVNEIINNVKENRDKAVFEYTKKFDKADVDASNIRVTEEEIKEAYELVDEKLLAVIKKALINIRKYHEKQLQNSWFTTEDGIILGQKVTPIAKAGVYVPGGKAVYPSSVLMNVLPAKVAGVEKIVMCTPCGADGKVYPSTLVAANEAGVDEIYKVGGAQAIAAMAFGTESVPKVDKIVGPGNIFVALAKKAVFGYVSIDSIAGPSEILVLADETANPRYVAADLLSQAEHDEMASAILITTSEELAKKVSEEVDKFVEVLSRKEIIEKSLENYGYILVAEDMDEAIDAVNDIASEHMEIVTRDPFSVMTKIKNAGAIFIGEYSSEPLGDYFAGPNHVLPTNGTAKFFSALSVDDFIKKSSIISYSREALERIHTDIEQFAECEKLTAHANSIKVRFEDMSDDRYLTFALGKGRLAKKTLQLFEQIGITCEEMKDPDTRKLIFVNEELKLRFFLAKGPDVPTYVEYGAADIGVVGKDTILEEGRNIYEVLDLGFGKCRMCICGPESARELLQHHEQIRVATKYPHIAKDYFYNKKHQTVEIIKLNGSIELAPIVGLSEVICDIVETGTTLKENGLTVLEEVCPLSARVVVNQVSMKMDNERITKLISDLKTVIKMENQLLHTPDGVRDIYNGECKKKLYLQDKLHRTLLKYGYHDIMTPTFEFFNIFGSDVGTTPSKDLYKFFDKEGNTLVLRPDFTPSIARSAAKYYIEDDMPVKLCYLGNTFINSSDYQGRLKESTQCGAELIGDGSISADAEILSMTVESMLESGLKNFQISVGHSQFFYGLTKAAGLSGEQEENLRELIANKNFFGVEEFVDSLSMNDKLRKLFGLLDNFDLQDEQLMEALKLAKGYDEILSSIDTLLKLREYLKAYGIEKYISYELGLISDYTYYTGIIFQGYTYGTGEPIVKGGRYDKLLSHFGKDAAAIGFAIVVDQLMAALSRQDIDVPVIENSSLIVFEEAVYHAAIKRSMELRRDGVNTQMVLKDKNKTKEDYASYAVDNRINRVEFIEEMATWNSRGLRGSTLEDMINKTNEKYRENGLALIQKIPTPITPIKMEPETRHITLAYFEQKSTVDYIGAVQGIPVCFDAKECNTDTFPLANIHEHQVEFMRCFEKQDGVAFILISYTHRNEYYYLTFKKLTEFWDRAAEGGRKSFRYEELEPAFFLPEVPGILVPYLNTLQLDLNCRAMKEFKAGKNEAGQRLDKYLKKILPNASMGFIYKMLRKKNIKLNDKKASGTEIVSVDDKIKIFLSDDTFAKFSVNEDSLMKDFKALSVLKPDGLGVVYEDDDILAANKPVNMLSQKSKETDISANERLIGYLIKEGKLDFDTYKSFKPSVCNRLDRNTSGLILMGKSLHGLQYLSQVLKDRTAEKYYMALVAGEVDEPMTIEGFLTKDEAVNKVQITKEPISDESLPIKTAYRPLKTIEMSASCHKATLLEVHLITGRSHQIRAHLSSIGHPIIGDMKYGDKRINAFYKENYHVTSQLLHAHHVILPDGRYIEAALPDIWSRVGLMSNGFLPISKQDMIDEGIEQLDFVYVCGDAYVDHPSFGHAIIARLLQAHGYTVGIISQPDWKDDESISILGVPRLGFLVSAGNMDSMVNHYSVSKKRRAKDSFTPGGVMGKRPDYATVVYCNLIRHTYKKIPIIIGGIEASLRRMAHYDYWSNKVKRSILLDSGADLISYGMGERSIIEIADALDSGMDVKDITFIDGTVFKTKDRDIIYDAIELPDYDVIKEDKREFARSFYIQYCNTDPFCAKRLVEPYDNSTLVVQNPPQKPLSQDEMDEVYALPYMRTYHPSYEEAGGVPAISEVKFSLISNRGCFGGCNFCALTFHQGRIIQTRSHESIIEEAKLITQDKDFKGYIHDVGGPTANFRQPACKKQLTRGACPTKQCLFPKPCKNLIVDHSDYIQLLRELRALPKVKKVFIRSGIRFDYLMYDKDKTFLRELCEYHVSGQLKVAPEHISNAVLSRLGKPSVEVYDSFVKAYKDMNKKIGKEQYLVPYLMSSHPGSTLKEAIELAEYLRDLGYMPEQVQDFYPTPSTISTCMYYTGLDPATLKPVYVTTNPHEKAMQRALIQYRNPKNYDLVHEALVKAGREDLIGFDKKCLIKPRKMHTDGGWDKKTSKSDKNSNSSYGSGKNAGVRKNLKNATERGKNGSGSNTAGTAHKKKTIRNVHKKKRMIRLDKFLSEMGLGTRSEVKKLIKTGQIAINGTVAVKPETKVDTDADEVSVNGRIVKYQRYEYYLFNKPSGCVSATCDNVHDTVMDYITDAVHDDLFPVGRLDIDTEGLLLITNDGALSHELLSPSKHVAKTYYACIDGEVTCDDIIRFKEGIDIGEERPTKPAELVIKKSGSVSEIELTITEGKFHQVKRMFEALGKRVIYLKRISMGPLKLPDDLKTGTYRALTQAETDMLMQIKSGKMLWFNQIFPLLFIFTILSNLIISTNVLQNIPQKHIMLFTYIIGIIFGFPIGAKLTADFCSKGYIDKNHREILSALANHFSLPFIITYALSEQLGICSHFSIYLVSLYLPSAIGMIAILSINKNKSLTQKIPAQGFKLNMQIVDAGIMKGFETLIKLCGYIVLFSIVSRIPQTIAQKADCSMPLSADIIGAFFETTNGIGIVCGLCIPRTLSIVLCIALLSFGGVSCMVQTKSIFRDTGFRLYRYILLKAAMSILSCLLCIILFCILIMSSKMEQIIEEIEDYIDGCKPSPISRNKILVNREQLEELLSELRTKTPEEVKRYQKIISNKEAILADAQAKADQIIAQAQIQTNELVSEHQIMQQAYAQANEVVQIATKQAQEILDSATNDANNLRMSAMAYTDSQLKSIEDILTGSIETSKARYDSLISSLQQFEDVVAANRAELFPPEENGDEAAGAESSDNEAASDTDTSDDDIEITNISDSDEDAKMKVGIYPGSFDPVTFGHLDIIERSARIVDELVVGVLNNSAKNSLFSLEERVSMIKEMTAHIPNVRVGCFEGLLVDYMKEINATIIIRGLRAVTDFEYELQIAQANGVQNPEIETVFLTSSLNYSYLSSTIVKEFASYGGDISKFVPEQFIDRIYAKYNITRMRIIAGTARSLPLKTIEGKDTRPTTDKTKETLFNVMQFDVPGAYFLDLFAGSGQIGLEALSRGAAYAVFVENSRKAASCIEDNIHFTKFDKVSRLMMTDAVTAVRTLEGKYKFDIVFMDPPYNKELEKEVLITLSDSDILKDDTLIVVEASNDTDFGYLTELGYEIVKEKIYKTNKHVFIKRAMNLPNKLTILRVILIPFFVFFLISPFFDGYGNYIALAIFIIASLTDMADGKIARKYNLVTNFGKFMDPLADKLLVCSAMICLVDLKLIPVWVVLIIIAREFIISGFRLVASDNGIVIAASYWGKFKTTFQMLMVIVIIFNINLQLGWLNILGTILIYVALVLTVVSLIDYIAKNKDVLKDQKMKLLFISLGCDKNLVDSEYMIGMLANDGIEMTDDETQADIIIVNSCCFIGDAKEESINTILEMAQYKETGKCKSLIVTGCLAQRYKDEIFKEIPEVDAILGTNSYDTIVEAVHETLEKHRYSNLHTLEGLPSIKTKRIVTTGGHFAYLKIAEGCNKNCTYCVIPSVRGRYRSVPMEDLIEQAKSLVEQGAKELILVAQETTLYGVDLYGEKSLHKLLDELNKISGLFWIRIMYCYPEEIYDELIESMIKDEKVCHYLDMPIQHCNDDILRRMGRKTTKAELMERIRMLRERIPDITLRTTLICGFPGETQDNHEELMQFVNDMEFDRLGAFTYSPEEGTKAAAMPDQIDEDIKADWQADVMELEEEVIFDKNETLKGKELYVFIEGKVADENAYIGRTYRDAPNVDGYIFINTDETLMTGDICKVMVTGAYEYDLIGELVKMIHPSYVELMKVVNNNVEIGEEPVVNSRYSIVIAAAKRARQIIDGAEPLIARPKCNKPLSIAVEELYTGAVRIVSDDEDLNEGEEAMSNTGKLVVFSGFSGSGKGTIMKELMAKHGDDYALSVSATTRGPRPGEEHGREYFFISEEEFEQMIKADGLLEYAKYVDHYYGTPKSYVNEQLSAGKNVILEIEIQGALKIKKQFPDTVLMFVSAPSADELKDRLVGRGTETKEVCAQRLSRAYEESLGIEKYDYLVVNDKLDDCVELVNDIIHSSDDTKKNQDYLVSSNIDFINKMRKELLSFSKGDKMIKSMTGFGRYEYADASRKITVEVKSVNHRYLDVNIKMPKKLNFFESAIRTLLKEYIERGKVDIYITYEDFTENNLSLQYNKALAGEYLKYLNQMAEEFGLENDIRVSTLSRYPEVFAMEEQPVDEDELWSSLEKALRGAFEPFVESRVREGENLKKDLCEKLDNMVSYVDFIEERSPQIIIEYRARLEEKLRELLADNQLDDSRIAQEVTIFADKICVDEETVRLKSHILSMKDSLNAGGSVGRKLDFLAQEMNREANTILSKSNDLKISDTGISLKTDIEKVREQIQNIEMALDGIVISNIVAELNSTILNSKISKIAEPEADELLLTLKGPNGSFRLSMSASASLPFIYLTPTNKVSPLTAPTFCMVLRKHIANGRITKIYQPGMERIINFEIEHLNEMGDLCHKVLIIELMGKYSNIIFTDSDGTIIDSAKRIPASVSSVREVLPGRAYTIPATQEDKYNPLTVDSKQFADIISAKPLTVSKAIYSSFSGISPLVANELAHRAGLDADSPVAAYSHDELLHLGSNFTWMMEDIKNNRFTPNIVRDGNEPKEFSSIELTQYSDLTVTKYESISEVLELYYSERNTYTRIRQKSADLRKHVNTLLERNQKKYSLQMKQLKDSEKREKYKVYGELINAFGYGLTPDDKFLEAANYYDDNKIIKIPIDNTKTPAENAQKYFDKYGKMKRTAEALNELILETKGQIDHLESIQNSLDIALSADDLVQIKDELIEYGFIKKGKGSKKQKVKSKPFHYISSDGFDMYVGKNNYQNDELTFKLATGNDWWFHAKGMPGSHVIVKAENKELPDSTFEEAGKLAGYYSKGKNADKVEIDYLQKKNVKKPNGAAAGFVVYYTNYSLTIHPDISDIRQIQMDIASPITSVKGIGEKTQKAFAKMGVYTVGDILLHFPRDYVKFPEITDIDELNNVNESSTYAIHAVIKKAPVVKNTARMQITLQDIGSPGHMIQLVWYRMPYLKAQLVQGRHLIFYGHIKPKGGRYVMEQPVVYEVQKYEAIRDTLQPVYSVTSGVTNNLIVKTIKETLSHDTLLSDYLPKDIRHRYSFCEYNYAMKQIHFPDDFGALVEARRRLVFDEFFLFIMGMRYQNKKQQKDKNEFEFTDDAFIDGLIEKLPYELTGAQKKTIDEIKLDIKSPYVMQRLIQGDVGSGKTIVAFLLMAWASKCGYQSAIMAPTEVLANQHYETFCSLVSQFGLDSPVVLLTGSMTAKQKREAYACLENEKNALIIGTHALIQEKADFSNLSLVITDEQHRFGVKQRESFSDKGRKPHILVMSATPIPRTLAIIIYGDMDISVINEVPAKRLPIKNCVVGTAFRPKAYSFIAEQVRAGHQAYVICPLVEETENSEGENVTDYANVLKAALPKDITVDVLNGRMKSKAKDEVMQRFANNESQVLVSTTVVEVGVNVPNATVMMIENADRFGLAQLHQLRGRVGRGDAQSYCIFINSSNSKKSKKRLEILNKSNDGFYIASEDLKLRGPGDFFGIRQSGDLAFALADVYQDSDVLKEASEMVDEVLEADPALCTPENRILKKKMDEFAKEQLKRMNLMEITSINSKLLARMFLAGAKNLDSKKDWINELNVFPVPDGDTGTNMTMTIMSAAKEVSSLTEPTMAELAKAISSGSLRGARGNSGVILSQLFRGFCKVIKEYDEIDVTILCEACQKAVETAYKAVMKPKEGTILTVAKGAAEKALELSDETEDVVTFVEEVIKQAEYVLDQTPEMLPVLKQAGVVDSGGQGLVQVLKGAYDALIGKEIDYTIEGAPTGAAPAKISAETEAEIKFGYCTEFIIVLNAPMSDNEEHAYKAFLESIGDSIVVVADDEIVKTHVHTNDPGLALQKALTFGSLSKIKIDNMREEHQEKLIKDSQKLAAQQKAEEEAYEAAQADEKTNNMPAKEMGFVSVSIGEGMNEVFRGLGVDYLIEGGQTMNPSTEDMLNAIEHVNAKTVFILPNNKNIIMAANQAVDLVEDKQIIVIPTKTIPQGITALVNYIPDHSAEENKEQMMAEIENVKTGQVTYAVRDTEIDGKTIKQNDFMGIGDKSILSVGTDLKATTLEMVDAMVDEDSAIVSIYFGSDSDEDSANELAAAIEEKYPDVEVEVNDGGQPIYYYVISVEMKGQMDTQYGQILIDTDVIATYAGSVAVECFGIVGMAAVNMKDGLVKLLKRDYLNHGINVKVDENNEITIDFHVIVAYGISIGTVSDNLIETVKYKVESFTGMKIAKINIYVEGVRVIDMAKCAICEKGVHYGNNVSHSHRRSNHVWKSNIKKVSCKVNGVPQKLYVCTSCLRSGKVERAMADNSFNNTVESLFKGMDSFITTKTVVGDAIHIGDTIILPLVDVSFGVAAGAFSAEKKNNGAGGMGGKIQPSAVLVIQNGQTKLVNVKNQDGMTKILDMVPDIVSRFSKGKNDDLNLDDVKVDDKEDDKQDMIFTILKVIGIILLVVLALILTALLCVLFVPVKYRAVGSFDNTDIRAKAHVSWLFHLFALHIEYAQETDGYIRLAFVKKKLFDNYEALDDDDMDEAAKTETEDKISENTGDGPKIPADESEHITDEQAEDECTARTHNEYRSVTDENQHIKQQTKPTHKKTYKKPHKKSHKKQFKDKSDKIKNCIYKLKREYSDERNKAAFLHLKKELFIILKRICPRRLKLTMVYSTGSPDTTGISLGILACFPVGYTNRWRITPDFESEKPYAKGSFDIKGHVIVISILAATLRILFDKNCRRLYNRISRMKWYEDLFVGESVTGKIKKIKWKIEHNAGMLHTYIITFPSNEENLLDIIPTRELLQKGYPKKNLHIIAVAGNYDEALLLACDIVKETYENTGKTDVKSYLKSRRRKMIEATSCGGVVIFRGKILLLYKNYRNRYEGWVLPKGTVESDEEYKDTAIREVKEETGASATIIQYVGKSHYSFTVPHDTVEKDVHWYLMMGESYYSKPQREEYFMDSGFYKYHEAYHLLKFANEKQILEKAYNEYLDLKKSNLWGTHKYYMIGYFLYFQFVKSDEFINSPYNSLQDLFSKNVVRGEIQTKDGHVIARTKVGSDASETREYPDGRVFAHVAGFAVNGKAGLEKQENFSLLRSHEFFLDQIVNDISGKKNTGDNVITTLDYEAQAAAYNALGDYEGAVIAIEPKTGKIAVMVSKPDYDPNTIASDWESVNGDGSTSLYNRATQGQYAPGSVFKIFTALEYYNENPSTYNDYSFDCDGSITKDGFTIHCAGNKSHGQEDLTKSFAKSCNSSFSNIGLLVDNNKLNTLCDDMLFNKNLPIAFDSKKSKFALDNNASSALTMQTTIGQGNTLVSPLHMCMIAGAICNDGNLMRPYLVDHTENASGALVEQNKPASYKQIMSKDQAAFLQNLMAAVVSDGTGAKLRDQSYEAFGKTGTAQVSDSTDQTNAWFVGYGKKDGYNDLAIAVVVEDSGAGSTYAVPVAKKVFDKYFNEMVHLIVQLSKYIMIILFLIYTFLCFHLFKYPDKPKKQRHIYNLQRFYMFLIHLDGFLVLFVTTMDTKIIGFYIAQLVLFESIYLIYHKFYKNASELVLNNMVMMLCISMIILTRISFDKALRQFVFVLAGTIFAFLIPLIMQKGTMFRKLTWTYAGVGILGLLSVLVVGVASRGAKLSLTFGPVSIQPSEFVKILFVFFIASMLYKSTDLKQLAITSGVSAVFVLILVASNDLGGALLYFFTYLVMIYVATKRFYIFAGGLAFVGLGMYAGYHLFSHVKNRIVAWLDPLSVIDKAGYQVCQSLFAIGTGGLFGFGLGQGLPNKIPIVSKDFIIAAISEEMGGIFAVCLIMVCVSCFLMIFNLSMQMKDAFYKYVALGLGSVYALQVLLTVGGSTKFIPMTGVTLPLVSYGGSSLLSTMIIFGMIQGMYIMQAAPEKRRNIDDKRRKDHETKNRQKQTAKEPGAQGSQQRRRKPAAGGKNSTKTQKMRNKDFELLAPAGSLEILKGVIESGADAVYVGGSMFGARAYANNFTEEELLEAIDFAHLRGVKVYLTVNTLIKNSEFSKLYDYLLPYYKRGLDAVIVQDIGVVKAIHEYFPSMEIHTSTQMTVTGADGVRFLSQFGVTRVVMAREVSLAEMKRIHEETGMELEAFVHGALCYSYSGQCLFSSILGGRSGNRGRCAQPCRLPYTVEGKKDEYILSLKDMCGIKALDKLHDAGVYSLKIEGRMKQLEYACGVVKYYRNYIDSKKPVSDADYDRIKALGNRCGFTDRYYFDHNGSDMVTYVKPNFVSNATEPLPEKRKLSIEGELVLREGEPGSLTVKRGDVTYKASIEPVSAALKAPLDKKAAIDRINKTGDTDFEFSHIKAQIGENVFVPNGALNKLRRDAISGLCDKLLKKYYRNDARYADMSRLTALPEHVVKSDAAHDEAINDYTTICSCMTRAQLDTLIGYECFDVFYLDFDMYDRKTLIQQFADDVKSLTKRNKKVYLMLPTILRADSSDYFVSIAKELDKVSFEGFVVKNYEELYLTENLFTGKKVILDHNMYTFNDVSKSAFFEHGVSGDTVSLELNSKEIMHRNNIGSQMIVYGYYPLMTTANCVHKNTKGCDKKQKLIYLKDRYNKSFAVCNNCKECYNTIYNSLPTMLTKNISKLKEAGIRSFRYSFTIETTKQIKAVMDDKVAEYTNGHYKRGVEMSAKTNAEVVIDGKVYTLSGYENEEYLQKVAAYINNKIAEFDDMDEYKHLPGNMKSTLIELNIADDYFKAKALVEKLEGDIENKDKEIYDLKHDLISNQVKTENAEASMKELEAQNKELLLNKARLEATLEESLLDGKKPVKKSAHASNGANDSSDKMKRVISTQLQEEDIKIEKSLRPMYFDDYIGQQKIKDNLKIYIEAAKSRGEALDHVLFYGPPGLGKTTLAGIIANEMGTKIKVTSGPAIGKPGEMAAILNGLSEGDILFVDEIHRLNRQVEEVLYPAMEDYAIDIMIGKGESAKSIRFNLPKFTLVGATTRAGMLSAPLRDRFGVVNHMEFYTVDELKHIIVNSAKVLGVEIDDKGAYEMARRSRGTPRLANRLLKRVRDFAQVKYDGKITYDVASFALDLLEVDKYGLDLNDRNILLTIIDKFAGGPVGLDTLAAAIGEDAGTIEDVYEPYLVKNGFINRTPKGRVATDLAFEHFERKRAMDSMYAYIKGELAEKNIDSIVVEAAGVGYLIYIPTQYFDMLPDEGEDVKIYTYLCVREDAMILYGFLSKDDLEIFKLLITVSGIGPKGGLAILSTLPADDLRFAILSGDSKAISKAPGIGAKTAQRVILDLKDKLSLEDAFEKKLENQASGAAVSMNSSVKNDAVMALNALGYSSTESLKAVSKVDITEDMDVEDVLKLALKNMGMKTRKIAYLGMLMALALVLSYVESLIPFAVGIPGVKLGLTNIVTVIMLYIAAPMETFLLCVFRAVLSGFMFGNAFSIIYSLAGCILSFIVMYLLKKSDKFNSVSISLVGGVCHNIGQIIVAAIVLSTYSVVYYIPVLLVAGCITGLVIGIVASQVLLRISDSFHVMRKRFGRNDIILISVIVIISVALLLVWKLVYLKGQDTDSDACVEVTIDGRAYGTYPLSKDDTIEIKNGDGDVTNTLVIKGGVADMTSADCPDHLCVKQKAISKEGESIICLPNKVVVTVKSDTKSDIDSISKMINLDDIDITQTPPTHEPERQYYYMAKARQYVKKKSEELGRPLTLFLKTFGCQMNARDSEKLVGILEQIGYVEGTDEHSDFIVYNTCTVRENANNKVYGRLGYLQNYKKKNPFMKIALCGCMMQEPEVVENIKKHYKFVDIVFGTHNIFKFAEILCNNIESGSQVIDIWKDTNQIVEDLPVKRKFSFKSGVNIMFGCNNFCSYCIVPYVRGRERSREPKDIIREIEKLVADGVCEIMLLGQNVNSYGKTLDNPITFAELLREVNKIDGLKRIRFMTSHPKDLSDDLIMAIKECDKVCKHMHLPLQSGSSRVLKEMNRHYDKEKYLDEVKRLREQIPDIAITTDIIVGFPGETEEDFLETMDVVKQVRYDSAFTFIYSKRTGTRAATMENQVPDDVVKDRFDRLLKEVQTISSEKAKCYEGKVVPVLAEEMDDQKDGYVTGRMDNNSIVHFPGTEDMIGNIYNVKLDECRGFYYMGEIKEDAMSEFNQNQYINKYIKEKYDRINLTMKAGKKEKIKSAASKRGMSVNEYINCLIDNDLLQNIEMSKKKKRQKKKGKNEALQNIILATAIINLIISVLQLLNLILNKMMNDIIRFFTATASNKIMEIVVICIVTDTIFGVLRAIKEKKFNSNFGINGAIRKVGMLISLVLLALVDSIIRLNLIGFIPAGARTYLPGQTVGTMEFFALLYIAYEIVSILKNMSLCGLPVKKVWRTVKKALSKYTNELPTDSTNMKGIDVSSYQGTIDWGKVKWAGVQFAVLKIIRKDLNPDKTFEQNWKGCTEAGMPIQGVYNYSYATTVEKAKTDAQRVIEVLAGRKTFVWLDVEDRCQQGLGQTLIDIINTYQSEIKPCRLDFGVYTGLSFYNTYILPYANQINCPFWIARYPSTKGMTIGDDPNDAKKPAIVHSLYGWQYTSAFTCSGLNNSTDANLLYVELGAKDTTATSQPAPAPAKPSDESWKGNVNYYLESEEVRKWQHAMNVGFDLKGDDALKEDGKFGADSQAFAKNHNLWSGQKHHCPTAIKWLRRTLHDVYSFTKLDTDYGKWTSYLSKCVKVFQKNRGLTQDAYVGLLTTYRLLKGMGTMIGKICFIYYKHIISGVVKNKEYFLENVTNLGLPLPLMKPDFPTLTSPMFMVAGDWSTPTAAIAALQLKADGTLSWVSSHGHTESLTYMGFIAYIAKMAKYLDLTGLKYFITKRIGKTDISKIGDGTCTGAISALNQSLGNLKTDLNKLNSLGNISIMKMGTKILEILPGNNSCLLLSKNDVISALGLSSSTFNFDNLCVSITNGDGAAFSGHLESPTITTTGIYVVWKDKVTASCNIRVNYILFYHDMENKYLNLTGAVYIISKIKTLLEDKSDKGHTHSKEEIGLGNVENKSSQTIRGELTSDNVIKALGYTPPKENTTYAVMKGATASAAGTSGLVPAPAAGDYGKYLRGDGTYGAPTNTTYSDATQTAHGLMSVSDKKKLDGIAEGANKTTVDSELSSTSTNPVQNKAVQAELTKKAPIASPSFTGTPKVPTASAGTNNTQAASTAFVTSAISTAMAGITKLDFQVVQTLPSTGVKGTFYLIANSGRGQNVYDEYLWINNKYEKLGTREIDLSSYIKQSDMVAITNSEIDAAFAMTEIELEMENDTELRIECEQIYIMDDYEQLKNKPRLNGKEISGDMYETDPTIPEWAKAQNKPSYTPEEVNAVNNDNAITIEEIEAIFNGLMRRGTTPTIKIKLKGCDINNLEKIYVTFKQGKYEFEKSMDQLNTSDETLFIKLSQDETLQLDAMKNVLIQVRAKTKDENVIASNIKSVPVEDILKEGMIMQTIKRDIYVTKNVLQAPIEVTEGTNSIALEFDIKDYTIPGTAAAVVYSMCTRTMAEPNKALAEVDGNTITIIPSESFFHAGQNVMQIRVIDGDSKLISFNIIVKCTGKMRFGDEEEEKQTTLVEQLLKRFGNYEAELKDVRKGFAGESYDTAGEAVRKQIESVNQKVDKIETISTKEIDAIMISNNKYLTQGEMESNAKEIYTYLSDKGWTINAISGLLGNMQRESTINPGLWQSLKEGNYSGGYGLVQWTPATKYTNWAKANGYDIGDGTVQLYWIDQLSESTGEWIKTSAYNLTWSQFKTSTETPEYLASAYLKNFERAGVEEEEARRQYARSWYDFLESGVEPAGRYIVRFIPAMIQIYNIENTNFDQNGDMSLFPSSASVHAVLNGIWEVTLEHPKDSEDRWKYIKEGAVVKMPSFNGEQLFRITHKEKSDSGISADLQPIFMDAADDCFLLDVRPTDKTGQQALDIMTAPNKKYTAETDITSTGTAYYQNKNLIEAINGDDENSFVKRWGGEIVYDNYKAIINRHAGSERGVEILYGKNIAENGMKEEVDLRNVVTRIIPQAYNGYQIDGDAPWVDSPLIDKYPTVKYSTMKFEDVKMRADAQEDDESKGVIICDTPAQLEAALRKRCQEQWEAGADKPQVTISVDMVMIEDTELYADVKGLVEVSLGDTVHCRNNNLDIVTDARVTELEWDCVNDRILSVSLGDYQFDYISNQVSINNRIESAIREDGSVIGSQVQGILDAVKTQFHALRDVAQKQDVRAMLFEDLNPDSPTFGAMCLGSMGFEIASKRTADGKDWIWSTFGTGKGFFADYIIAGTMLADRIYGGTLTIGGIDNIAGIIKVLDGNGAILTIMDKDGILTNGKYTCGSDEFGRRVEISEGEMKIMDKSGNTVGRIFAVSNEIFKIGTENALFRMFKTGEVYVDCQSFGVNGYNGFTGTVEYSDGTYENYVGGLLIGGKSKEGAYPMQDIQYNDIRGSSLQIFARELISIPAAQPNMEEVKLSGRDGTIYKFNGTYAATPIKIPFNYIGAVDRWNDRWRMAKQWLSERNAKLIISDDAGFFYKITYVELDDNERTSERIGNFTAIFHTLDGLQYSVDGAMEYDIEDVCWNPYIECHPTYKIAAEGMCTLKINGKTMTANVGQNLTIDTDRMIAYREDGTLNNTKVSGNYEDMYLQPGNNKIEFYGGNLKVIPNWRCLMAGLKKALVNASGEGKSMKQALSDLQSTMSGANNSTEAYNAAIDLFGSKAGPALAQFCQEGKLNFEELGKSLNDNVGSVSDTFNATLDPADQFKLTLNQLKDEGFELGNALGPILAQCLQTVTPILKDIINSWNSLSPETQNMIIKCALLAASVGPVISIISKVSGGVSSLIGIISKIAPVLGPIKTGFAAVNAVMAANPILIIIAAVAALIAIFVTLYNKCEWFRDGVNAIFGAVADFIKGAIDKIKGFFDFDWKLPKIKLPHFKASGEWSLSPLKVPKISVDWYANGGILNSPTIFGANGDSLMGGGEAGKEAVLPIKLLKDYIREENDANNATLAAMIVEAFKSISMTAENNIYIGDKKSITLLTNLVLKQMANKTLATQGAKGKMVICKEIDDYLKYVKEHPQWINKKRKQLIKNIVKPLLRRNDIFFDKKTYENCLEYCKVNYYELFPYQKFIYAFVFMYKDDIPVFPKFFIKEGRGNGKDGFIVPLANFMQTPLYGVRNYHVEIVANSEDQVKDTFKVAYDMLHENAKFKGKFSVTKELITNLATGSEMKYNTSNAKTKDGKRTGCLVLNEIHAYENYDQINVFESSFGKVKHSREFIITTDGYVRDGPLDEISSMCAEILETGENPLGYYPFICEIDSMKEVDIPDAWHKANPSMEYMPILANQIMHDYLEMKKIPSKRPEFITKRMDRSARKEEKTVTTWLNVLRACYEGSTTEEFELKKPRMTIDTKGQPAVIGIDYADIRDFASAGVLTKTESGEYIWRQHTWICAESPFLDSIKFPLKNIGQTEFNDFEVVPGPVIDVNSIVDWCMERCAEYDVKKIAMDTYRYTLFKMVFEERGITIEDRKNPNGVVRLIRKITSATGIIAPFIQSMFSQGMINFGASAIMRWYTNSVRRQVLIQVRMTKTEIRDSLVKQLELRGMNAEFYKDMIDDYVYYWSLKKKLISDIKSKGLRYKTINGNGVEVEKTNDSVVNLQKTTATMLKILADLRLKDPVPEPEKATDGYLMKRARGTISQNYFKKNFFEEHKNTVIFLIKTVKKYANYTQKTDIFMTDTEAKKFYDSKAWQTKRIEILKRDRFECQDCRARIQKAVAKGKWLPEKEKKIARAEQVHHIQELKEHPELALDNDNLISLCVRCHNIRHGRVPQKFKRKKKLVSRERWMTKKELTSVYYIKKEIKMWEEQLELIESKAEGKAMQITGLPFTPGTGSSDQMADLAIKAVSVRELIEAKKRKLNQQQDRIISWIISIDDTVVRQIMLYRHVRCYSWNTVAQKIGITAESARKQHDRYLQQSQKENKMKKYDNYDYEEAFKKYIDDTEEERLEKLLREGKVNCLYRTATTKCTNIKSQTTLLEARIYPSYPRLSDMPKTKKRPSSKAQRNLNDKNARRYLIRLANINFGKGDLWCTFGWNDDKLPADEERARKDIKNFIAKINYRRKRKGLENIKYIYVLAFDGYVRPHFHILMTGDGMDRDELESLWKKCDRPNTRRISPNDDFLITGLGEYISRNPHGTKRWVSSRNLKKPPEPTKSYSKFKKRRVERMAKDHTVLETELTKAYPGYKFLDAEVKYNGINAAFYIYARMVRNMKKDSVKKETWKEWEQTCEKLKKYETTLKRVVLTTDKKLLYQAEYNRKIRAAQRQQMNRNECQNCKYYEKCGKPSRPIKCMGYEPKEAAVEEQNIERHKANKTQKVMSGIDLIVYGMLLAFTMIGTTEFVIGLLLLREYDKLQKEKEKMKTSLKNAELVNTVIRKMMTIMFIAGKEMKNVNTNHAKKNTASGKNGFGQKQNRRIICQEMKCKICEKEFELKKEEKYLATEKVAAFGTLAKLPKTFEAFDCPHCGCQNIVNIREEEATDYDVDKVVEQLSDRSTLSRPVDWSKVAVDTPILVRDNIFSKWAKRYFAKYENGRVYVWNNGSTSWSDNRCTPWKLAKLPDKESGDGRMFIDCAKLEKILKADYKTWGVKFGLTEKGMYILNGTGWMVEADKEKITKEFLGTVIKTCGLAPEKGEFMTYQKGHDPQFETERKPLLWDMAEDTKEALISPIKIMQNDNMMSVVKTPGGVRLINDARLAIVNPDKCRENENPPSTFAVHGDWLISYNDEMAVGICFTSPAYKPELEVLRLLSGVDFYWIETPHYELMKVYNLIPEDIERIGNGLRDAFAEMFKTLQRVAESMARAFEDMGKNQVRRMIKMTRVYGDMYAPREYCTFTNPVTSGGTEEVDYVDMPCENGCEKECENCTLQKIMNEYARLTRQDIDEKKRHCEECENYKEIRKGPRMEYVQMTLDDWVQMKQKLRQELIGVKQSFVRIGYALRQIDDQRLYENDGYKSIAEFAKAEYGLEASTTSRFMSINREYSIDGYSEHLRPEYTDLGRSQLEEMLKLPDSDRQMVQPETSREDIRELKRFNKTEPTEGVADNTSQLIEKFFEENKDILNEVYSNEFDEESMSRFAEIVNPAGNRSFKKGLYFMMMYENRVTIKKFGDTPKNMSWWEFYQRMSSIFDEDAAGTRTWQNHFGGDDETQENEPTGEHTTAETPESEDDNAAVGEAGTDEVEETESGSVADNEPAPGAGEEQKDDSTDRDTDCGEDNKEPADRPEEQTGEKSLAEQIAPAQKSTETLEKEEVEDDETGENESSDAENQTAESEPETAEREQTEETEVIEAVYGTRKEYMDRLSEQGMAEYMADEYKSHRLLVTDLANIWNLRKWLSEKVDRFGKPMEDARMKKKTIEKIPYLGLKKISRIKSVKYIGVTAVKNIGHQRHLFLEVYENKKESKKIPVVRITLTKKDFGTYWPDKHVWTRQQVSYYRPIWMETHTGGILTDENILQSPEDLERIKNFCGTKLFDASWWWEHISRYEADITSTERINRVERERKRRQEALKDRQANTKALPEKAILYRADHAYFHDEHFLYYKKHGSRADIACSKCGGVTTARWKSSGAYEDQFERNIEEPRENSFGTCPMCGARGQYKCKGKVKGSIRKTQYLFLGQKYKDNGFVMRYIQVEKEWTLGFIAGENGNEMYNAYEKLSGVELARAYFEPGKKVQVDYNKHDPYVGKDFWDDCNLYGLSSIRINSGPILPETYDEMTGTMFQYSAMKEYTDSLMSTCNPVEYLECYMRTPQLEMLVKMHLIGVAEKLIKCQYGIIEDETATRPDEFLGIRKEKLKLLIKEKGDIGLLRVLQMEKRFMENWTDEQVQQLAETGLTYTQVALAKKYMTLQKFLNRIKKYACCDYGGCSRSVYRIRHMASTYADYLSMRENRGYDLTNTVYQFPHDLDEAHEKMVEEVNKEELDKHLKDVAARFPNIRHSYRKLRNKYYYEDDTYIIRPAKSAEEIVTEGRVLHHCVGGDNYLGKHNRGETYILFLRFKDTPNMQYVTVEIDSEVPNILQWYGAHDKKPDQENIQKWLNSYIRMLVTGTLRTAGMPAATTADMPAMAIAMFDKFGEFDSFSEINELAENLLNEGDIESLKVVAKENGIQADFVDLYTNGEIPELCDKLTAALGKIDVEAAELKPKEIMEDWVEYLRGQCMENELLAHNVRKKGKTLKGCIAAILMWSFKNQQTVDKDIIKAAGVSASKVTLGIPGMARAKKIITDYYMGKMPKYTKYLEFSQKERTAIRERDNYRCIFCQIGYEMPPTAVPEMDITDIMHYIPRSSMGLGIRQNGAVGCRYHHHMMDNGSSGNRKEMLGRFRAYLDAFYPDFTDTERKYDKWSFLKEKPYVMKLFKKHTAGMKQYKEFKKCIGMIGKIEESADVKEAALTAGYIIGVVKERHDKRLITDSMFDTLKELTDIMLQDVDERMESNTPYIMQIEAMENKLKEALKKLGIETAEQLNAAIKAEKPLDIGIMTSEVAKEQKAASMKTLTDLFYSAYSPRQKRYHLSMTLREKDGEHIIKILQNGREVIRATGDEREQAFQMAARDLVRRFPAKGRMKLNNDCIRDILLTLEELCTFENKFTYDIESQPPHLLAKYSREEVLYHIRQCEHSALILKPLYCYGGDIVEISDLSPSGHEYLANIRSDNIWNKTKKVAGEIGATSLSAMVQISSQIITAIIKSQFGLTMTKEELLILEKILEKIDKADEMNCKKEEEYNSFCTNTREDWNEEQYQKLKREKILTEAAYLASLVELKAEVKNMLNQMRIGLEIEVSDKELLGRLANVKEKKEALDRAMAQLESCITSRYEAKKHIAKETYRPALFEDAEEKKPMWKIFFTYKDKSRCTVQGKGIITPELAVKCYYRYGIHAAESIYQQYPKKDHEPVPMEEKMREFGVDAKEMKTAVLQWETLLDRMQEKESKMSNNDLSLIEKFKSLMQQAMLYAQYSHDYIFDDSVEDSVAIAYLNIAASKFAAAESLYYSCFNILERDEAESIFHIFDVYMAEMLTNHKTEHSHQWTDIEYNRLKDTFDSSAFAFMGYKIKEIREEIGMTQAELSIKSGVSRTIINGLETGRTTTTTTDTLKKIAAALDKKVSEIFFNMFNKNYFNMLNMYNLALFNMLKFYIDLFIKHVYNMLNNTQGRSDMTLGELVKKYRTEHELSLRDFSRLSGISNGYISMLEKNEHPKTKKPIVPSIEKMKCIASAMNMSLDSLLDAIDGDQEVSIKPEPASLIKADESELLAKYRHMNGKGKQRLLERADELIELGYVAKGDELKEAMRKKIYNILNQNAIYDTFMFTVIIMSIIPLAFVKQQSWMTLIDRITVIIFIVDYILRWFVADKLSNKLNKFILYPLTPMAIIDLLSILPSITLLNSSFKLLKIFRLFRSLRLLKILKLVRYSKSITMICNVFKKQKETFITILVMAITYILVSALVIINVEPETFPTYFDALYWATISLTTVGYGDVYAVTTIGKIITMISSFLGIAVVALPAGIITSGLMDELSKSHDEMNKQITYTDVYSQLEKLKSQNLIISDEAFAISALSRYGYSNLIKSYREPYIIRYNDSIYYKDGVTFEQILSLFILDKNLRNSVMAAMLDLEEFIKEAAADVISKSFGTASAKYLNYRNYANKKRRKKRFTLSETLEKIKKALYSDKDPIHHYMSKYGDVPPWILFKGVYFTTIVNFVGFFKTPEQNEMISHLYHDHYDFIYDDSMKKLMMDTLFICIDYRNMSAHGGRIYNYQSRNTLRKDEIFHADYGLMTSGFSELLFILSLLSYTTPFDRLNNALQYELNRHCSLFPDDSEYLSKVLNIDIVKKDFVYYKASGSKYHTIPSCSGMQDAIQIDIEEAKSLGLAPCKRCCNMSKTVAIYVRVSTGKQADRDSIPFQIQECSNYVKHFLKTENFEVFKDAGRSGKNTHRPEYQRMIEKVKSGMISHVVVYKIDRISRNLVDFSIMYNDFKEHKVAFISLNEQFDTSSAIGEAVLKIILVFAELERKLTGERVHDIMMNRALEGKWNGARVPYGWDWDTKKQCPVHSDTEAEYARMMYRLYDECHSTCVVRDYCNAHDIPTKRGGEWTSKTVADFLRNPMNVGDYRYNYRKSARGKRNDPSEVIYVKDVFPPLIDRELYERVTHQMDLNTFGLGKDGRKVVSKKTHVFGGLVVCGLCGAFYHSDADVVRADGFRPSNYRCGAHNKKIHCKAKGTSDVKLGPFIFNYISNLVKASKSKKLLHSVSDLEQILLTGPEFEQVAGIADIGLDVTFDTIMHGFKPKRYTAAPYTVIRSGDSDALTAKRDKTIRALERLKKLFLFEDDAMSEKEYLMSKRELEGTLSDIENELSALEADTADTKYDDMSFISTASGFLIAHQIASGEHINYRELACAVDAKVLKDFVNSVIERIVLLDGRVASIEFKNGLVHEFLYREMSYDIDITKTPPAHEPERQYYYMAKAKDFVEKKSKEIGRPMTYFVKTFGCQMNSKNKMPKTLMTDLEKICADAYEARVKIGTLDTDIKNKVLNDAADNLLKAEKEILEANKRDVAIAEENMKAKSMIDRLSLDHDRLLGMADGLRQIAKLADPIGEVMSMAKRPNGLIIGKRRVAIGVVGIIFEARPNVTSDAFGLCFKTGNCVILKGGSDAINTNIAIVKALKKALTDNLVSAAALALIESTDRETTNAFMKMDQYVDVLIPRGGAGLIQNVVKNATIPVIQTGTGNCHVYVDKDADFDMAVNIINNAKTQRISVCNACESIVVHSAIAEEFLPKLYDKLREHHVQLHCDERAQAILAGRDDVTEATADDWGMEYLDYIMSVKIVDSIDEAIEHINRYNTSHSEAIVTNDYDNAQKFLNEIDAACVYVNASTRFSDGNEFGFGAEIGISTQKLHARGPMGLEALTSYKYIIYGSGQIREMETKKEIRSRLKKQRSLLGADECHNMSHDIYKRLIALELDREYDNILLYSAIRNEVNTDEYFTYLINKAKRIYYPRVSGNKMSFYRVRSLDELNCGSFNIKEPDMTKEYTQADGRALMIVPGLAFSDTGYRIGYGKGFYDRYLSSFTKRDTVMAVGVGYDFQLLSSMTIEDEYDVPLDGVITDKREVFIDDMTQEKIQRINELYRKSQAEGLSEAEKKEQDLLRKEYIANVKKNLRNQLNNIDMVNDDGSVENLGEKYGNKKRNSMRNVIMYAFRLTIGKMIEMSFLDNYKRVVIKIGSSTLTHAETGSLNFSKMERLVRSICDYRNSGMDVCLVSSGAIAVGRDVIGIKERPSDISIKQACAAVGQGRLMMTYQKLFSEYNQNSGQVLMTKNTIVNPVSRRNVMNTFEELFDLNVVPIVNENDTVSTYEMQFGDNDTLSAIVTSITKADLLILLSDIDGLYSDDPHDNPDAKLIREVDTLDRRILGMAKSSTGSDVGTGGMATKLTAAKIATYSGADMIIANGGNMGILYDIMNDRYTGTLFHRAKDAEFVLADYIQREMAPTSTGGQMKNKLKHLVPVLLALATITGSLSSCELKPKAQQKVSKQGFYFDTIIQITLYGTTDEKYIDDCFDMAKKYEDMLSNTVSYSEVSKINDAAGKEYVTVSNDTLELIKNGIEYGDTSDGRFDITIGKLSDLWNFSEIAENTDSKDNEVDASVVPSDAQIQSELSHVNYRNIQINGNDVMLTDSKAKLDLGGIAKGFIADKMKAYLQSKKITSGIINLGGNVLTVGEKSDGSDYTVGIQKPFDESGEPICTVKIKDKSVVTSGIYERYYRVDGKLYHHILDTTTGYPVKNNLYSVTIISDSSCDGDALSTTCFALGIDKAKELINSLSGVEAIFVTDDYSIITTSDEYNVSKEMNVTAIIIAALVVGAVGIILGFFLGISGEKFKVEVDPREEAILEVLPGNNCGGCGYAGCSGLAAAIAKGEAPVGQCPVGGDPVAAKVSEIMGVKVEAGVKKVAFVKCAGTCDKANTDYDYTGVEDCVAMSFVPGGGPKSCNYGCLGYGSCVKACPFDSIHVVDGVACVNPLTCKACGKCVEACPKHLIELIPYDTKHVVKCSSKDKGKDVMKACSVGCIGCHLCEKNCPSDAVHVVDNVAYIDQEKCTGCGICAEKCPKKIILMGTLGHLLLIAVAYAIVNNVVLSQFLGICPFLGVSKNTKTAAGMGGAVIFVITIATFVTQLIYNFILYPLNLSYLQTIVFILVIAALVQFVEMFLKKQMPPLYKALGVYLPLITTNCAVLGVALNSVTKGYNILESVVYGFATAFGFFIAIVLMAGVREKIEYNDIPKPFQGTAIVLLTACLMAIAFMGFSGMVSVMNKYVERLYNGIIKENPTFVLMLGMCPTLAVTSSAINGLGMGLSTTVVLICSNLLISLFRKVIPNGVRMPAYIVIVASLVTVVQFLMQAYLPSLSAALGVYIPLIVVNCIILGRAESYASKNPPVESIFDGMGMGLGFTMGLTIIGLIREILGAGTFFNIKIFGDWFTPITIFIMAPGAFLVLGFLVAGMNIIRKKMEAKGTPLAEPAGCLSGDCAHCGASCPSAKAAQAAVAPNTAEGGDKMNKRIVHDALILTAFTLVLGFILALVQGITAEPIDKANKAAAQKAYQAVFSDAKSFEKYDYDADEADKLVSDAGYKDTIDDIETALDSNKKTLGYVITVTAKDGSQGSITFSVGIKNDGTVNGYSITSISETPGLGMKAEEADFYKQFENKKVDKFDVVKATPSKDDEIEAITGSTITSKAMANGCNAAITYFQNKLQGGANMSDLYHVSSSPHVRAKDSTDRIMLYVIIALLPASLFGIYNFGFRALFIILLTIASCVASEWVFDYIVKKKSTITDLSAVVTGLLLALNLPVSLPWWEAVLGGVFAIIIVKCIFGGLGQNFMNPALGGRCFLLIAFAADMTNFNVTRNGVDVYSGATPLALIKNEGLSSVNVRDMLIGNTAGTIGETSVIAILIGAIIMILLGVIDLKIPASYIITFAVFMFLFGAQQFDINYVVAELCGGGLMLGAFFMATDYVTSPITPMGKIIFGICCGILTGVFRCFGANAEGVSFAIILSNCLVPIIEKVSIPRAFGMVKEAKKNEMGHKTFIGGVHPYDGKELSKDSPIKEVLPKGDMVYPVSQHIGAPAKPVVAVGDTVLKGQMIAEAGGFVSSPIYSSVSGKVKAIEKRRVAVGDMVDSIVIENDGMFTETTYKSVEDVTALSKEEIIEKVKNAGVVGMGGAGFPTHVKLSPKEPDKIEYIIANCAECEPYLTSDYRRMLENPEELIGGMKIILQLFDNAKGILGIEDNKPDCIEKLTELTKDEPRIEVCPLMTKYPQGGERQLIYATTGRAINSKMLPADAGCIVDNVETIIAVYNAVKNGQPVLKRISTVTGDAVKNPSNILYSIGTSYQELVDAAGGFKSQPEKIISGGPMMGFAMFSLDIPTTKTSSSILCFTHDEVAAFEPQACINCGRCVEACPEQLIPSRLAKFGLRGQMDEFEKWHGLECIECGSCSFACPSRRQVAQPIKTMKKLVLAEKRKQASKKMKIFHNEEIYIKTDNFSDSIFKENTMFFDIETTGFSPVKAIVYMIGCARRIKNRIVIDQYFAESVDDEAAVIEAFAGSLSGCSTIISFNGVGFDIPFLKNKYKKYKQDDPFCNVQILDIFKELSPIKPLLCLENYKQKSIEAFLGIDREDKYSGGELINVYYEYLAQKDDEKLSLLLTHNYEDVLGMTKLLSILSYKECIHGIADITGVSVNPYTAYDGSLMNELIISFENKFSVPKSVSFHDNDIYLTIGTTKSYVRAEIFEGEMRHFYSDYKNYYYLPKEDMAIHKSVAAYVDHEYREKCKAYNCYVRKTGAFIRQYSDFMKPEFRFDIKDKYSYFLLTDDFINSKQMVLSYVKHITDHLFNLMSEMSFEQMLEESFKTIRNGEVVEGTVIDVKPDEIFLNIGYKSDGIITRNEYTNEPNVDLTTVVKVGDKMEAKVVKLNDGEGQVILSYKRLQAEKGSKRLEEAFENQEVLKAKVTQVLAGGVCVSVDETRVFIPASLVSDTYEKDLNKFKDQEIEFIITEFDPRKRRIIGNRKVLLVEQKAKQQEELLANLHVGDVIEGTVKNVTDFGAFIDLGGVDGLLHISEMSWGRVENPKKVFTVGQTVRVFVKNINGSKIALSMKFDDENPWNGATEKFAPGNIVKGKVARMTDFGAFIELAPGVDALLHVSQISKDHVEKPSDVLKIGQEIEAKVVEFNEDDKKISLSMKALLDSEDDGADVADVNIDEVASDNEMGELTIAKSAGFCFGVTRAVNMVYEAIEKENVPIYTYGPIIHNDEVVKDMEKNGVTVINDLDELSSHEKGVMIIRSHGISKAEYDRIKNCGFEVLNATCPFVSKIHRYVEDYSSKGYDIIIVGSPKHPEVCGIKGWADEKCHVTIINSPEDAENYMKNSTKKLCIVSQTTFNYNKFQDIVEIIAKKGYDITVLNTICDATEVRQTEARKVAQCSDVMIVIGDRHSSNTQKLFEICKNECKNTYYIQTSDEMDYTQIRSNNNVGITAGASTPNNIIEEVSKNVRNELMRYNIAIDGPAGAGKSTIAKRLAKELGAIYVDTGAMYRAMAYYFIQKGVDKDDIDTITKLCKDVEVSISYENGEQQVILNGENITGFIRQETVGNMASATSVYPVVREKLVELQRQLAARENVVMDGRDIGTVVLPDANVKIFLTASSKVRAKRRFDELTAKGEKCDIDAIEKDIIERDHRDMTRETSPLKQADDAVLLDSSDMTIDEVVDRMKQLVKEAMSKKIIVVGGGAAGMLAAYFAADVGNKVTLLEKNEKLGKKIYITGKGRCNLTNACDVEELFLNVKSNSKFLYSAFYGFDNSRVIDFFESHGMPVKVERGNRVFPVSDKSSDVIFALQRALKEKKVEVLLHTEVSKLCYEKITDTRADEEASDKKPELKITGVILKDGTKMDADAVIVATGGLSYPSTGSTGDGYKMAEDAGHTVTECTPSLVPFNVKEEWVKSLQGLSLRNTAISIYSGKKKLYEDFGEMLFTHFGVSGPMILSASASIKQSLIKQPLDMYIDLKPALTQEALDKRILREFEEAKNKQFKNSINKLLPAKMIPVIIELSGIDPDKKVNEISKEERNRLLMLFKKLPVTLNGPRGYNEAIITKGGINVKEINPSTMESKLVNGLYFAGEVLDLDAYTGGFNLQIAWSTGYLAGTSAAVMSNTNDLLNRINAKYSTMSKGHKLLATYITDNYDKAVFLTAAKMGETVGISESTVVRFATSLGYKGYPDFQKALEELVRNKLNSVQRMEVTYGRISQSQILETVLQSDRDKIKTTLEKIDADAFDLAVDTILQSRKIYIVGIRSCAPLASFLAFYMNLMFEDVCLLTTNSSSELFEQMVRIGKDDVIVGISFPRYSMRTLKALEFANNRSAKVITITDSIHSPMNLYSSCNLIADSDMASIVDSLVAPLSVINALIVALCMKKQNIVAKTLTELEDIWNEYQVYENDEIDYIDDSIKVHYAKLGDSQDEMSEVVKKPLKITETVLRDAHQSLIATRMTTEQMLPIVDKMDKVGYNAVECWGGATFDACLRFLKEDPWDRLRKLRDGFKNTKLQMLFRGQNILGYRPYADDVVEYFVQKSIANGIDIIRIFDCLNDIRNLQTAVTACNKEKGHAQVALSYTLGDAYTLDYWMDMAKRVEDMGADSLCIKDMAGLLVPAKATELVQALKDSTSLPVELHTHYTSGVASMTYMKAVEAGVDIIDTAMSPFALGTSQPATEVMVEAFKGTEFDTGLDLNLLSEIADYFRPMREEALASGLMNPKVLGVNINTLRYQVPGGMLSNLISQLKEQGKEDKYEEVLAEVPRVRKDLGEPPLVTPSSQIVGTQAVFNVLMGERYKVATKETKDILLGKYGQTVKPFNPEVVDKVLGDDKKNAITCRPADLLEPELDKIEAEMKQWKQQDEDVLSYALFPQVATDFFKYRQAQQTGVDAKAADTENKAYPVMSYVGETLSNLLHQTAFFNLSVGNYVMIAVACVFLFLAIKKGFEPLLLVPIAFGMLLVNIYPDIIVSPEHSSNGVGGLLYYFYTLDEWSILPSLIFLGVGAMTDFGPLIANPISFLLGAAAQFGIFGAYFLAILLGFNDKAAAAVSIIGGADGPTSIFLAGKLGQTGLMGPIAVAAYSYMALVPIIQPPIMKLFTTKKERAIKMQNLRPVSKLERILFPVVVTIVVCTLLPTTAPLVGMLMLGNLFRESGVVRQLQETASNALMYIVVILLGTSVGASTSAESFLNMSTIKIVILGLIAFMVGTAAGVLFGKLLCFLTKGKINPLIGSAGVSAVPMAARVSQKVGAEEDPTNFLLMHAMGPNVAGVIGTAVAAGCFMAIFGIMKNYTITVNGNVYDVTVEETGSTPSTASAPRRAAAPAAAAPKAAAPAGAGSIKVEAGAAGKVFKLEAKVGDAVKKGDTLLILEIMKMETPVVAPQDGTVASIDVAVGDSVESGALLATLNMKKKITYILSLLMIVCMLGACGSDNAEKTYGGYTTDELHTEATDSLSNIQNYIALVDSCGGYDSYEKSVKGVEEKTGMTEGEVVYNTLGQSGASVSMKNIDAELDAVSSWLDLVDKYGDVKDATDGKDFTVTKSGGTLTTDMTLTFGKQDVTYELVYDSVTMEVTGISLTPVQTMGQKLAKAGQNTVISMSIVFCVLILISLIIYCFKFIALIGNKPRKAEAKSEPEKKEAVVAATPATDLTDDTELVAVISAAIAASEGTTTEGFVVRSINRRMSSNNQSLAMQRIAKLVDENSFMEIGSLVTARSTDFNLTAAKAPSDGVIIGHGLIDGNLVFIYSQDATVLNGTIGEMHAKKIASVYDMAMKMGAPVIGFIDCGGIRLQESVDALDGFGLIYAKEVAASGVIPQICGVFGNCGGGLSVVPALCDFAYIEESKGRMFVNTPDAIEGNRVEKCDTAAASFQSENNGCVDGIGSEDDIIADIRALVSMLPLNNEGDVYTDSCEDDLNRACNSMADMKADPRFLLSELSDDHVFFETKKDFAKNMVTGFVKLNGMTVGAVANCSTVYDAEGKKAEEFALSLTAKGCNKAAEFVSFCDAFSIPVLTLTNVNGFKNCMCSEKKLAKALARMTYAFSSATCPKVNLITGEAYGSAYVAMNSKSIGADMVYAYPDAKIGMMDSKIAAEIMYPGADAKEIDEKAADYEKLQSSVSSAAARGYVDLIIDPADTRKYLVGAFEMLYTKYVDAPEKKHGTKMIIFLKKYKSKIALIVFICVLFCTVSCLLDFKSLEKQKMPGLEKKSVFMAAENTVAKNTDKAVNEPKLHAVSAALYDADDETFIYGRNMRDSMANASTTKLLTCIVALEKADINDTVTISQNAASQPAVKLGLVAGNSYNMKDLLYGMMLESFNDCAYAIAEHVGGSTEGFAKLMNEKANEIGCLGTYFITPNGLDAENDISFHHSTAGDLCVIMSYCAWKSPKSTQFLEITQTMQYTFETEEGQMVFNNHNRLLTETDYCISGKTGFTTKAGYCYVAAVEKDGRRMCLSLLGCGWPNNKNYKWADAKSLVEYAVSDAAEDSYCDAACVTTQQTGDTQTTDKQAADEDITDKQAAGKETMAVKKEDRNTINLKYIENNKKNKKICKNFLKNFTINIGNFFMNYKAAIEAILFTMGESVELGRIADAIQLNEKETKKLLDELIKEYRSSSNIGMNIIELDGAYQMCTKPQMYEYLIRIAKQPKKRVLTDVLLETLSIIAYKQPVTKAEIEKIRGVSSEHAISKLVEYNLVQELGRLDAPGRPLLFGTTEEFLRSFGVSSIDELPVLSPVQVEEFKQEAEEEMHVKLDVMDMTFKLQVFEGPLDLLLYLIEKNKVNIYDIPIVEITAQYMEYVDQMKRDNLDTLSEFLVMAATLLDIKSKMLLPKKEEEEQEQEDPRAELVQQLLEYKMYKCMANELKDRQLDAGKVWYKKKDIPDEVLAYEEPVNLEELVGDIRLSDLNRIFQSIMKRQEEKIDKVRSKFGKIEKEEVSLEEKMEYLTDYAASHKHFSFRGLLTASSSKVEVIVTFLAILELMKTGKLTIVQEHIFDDIRIESRIAAMKNLEIYIHIPFCVRKCEYCDFLSFPADDDAKLRYVKGLMAEMIFYGPLMKNYQVSSVYIGGGTPSSIDEQWIAALMECMFDCFNVLPDAEISIECNPGTLSREKLLAYMDAGINRLSIGLQSANNDELKRLGRIHTFEQFVTNYELARNVGFKNINVDLMYGLPGQSASQYMATVNKIIRLNPDHISAYSLIVEKGTPFYEKYKVDMVRQEAGMRTEFLPNEDELYDMEKAGQKAFMDAGYRQYETSNYAKRGMECRHNIGYWTRADYLGLGIGAASLISNVRYNNTSDMDEYLSSCRHIHDVGDDIFKANLHVAADVIDKKEQMEEFMFLGLRMNEGVTREAFERAFGISIDAIYKDTIDSLKKQELLVVKDGHIYLSERGKDVANYVMAQFLRDMSIDQSKIRNFCIIAHIDHGKSTLADRIIEKTGTLTSREMQAQVLDNMDLERERGITIKSQAVRIIYNAKDGEEYIFNLIDTPGHVDFNYEVSRSLAACDGAILVVDAAQGVEAQTLANVYLALDHDLDVFPVINKVDLPSARPDEVAQEIEDVIGIEAMDAPRISAKTGLNIEDVLEQIVKKIPAPTGDKDAPLKALIFDATYDSYKGVIIFCRLREGSVKVGDTIKMMATGASDVVTEVGYFGAGQFIPCDELSAGMVGYIAASIKNVRDTRVGDTVTLVDRPCDEALPGYKKVNPMVYCGLYPADSAKYPDLRDALEKLQVNDASLQFEPETSLALGFGFRCGFLGLLHLEIIQERLEREFDLDLVTTAPSVIYKIHKTSGEVIDLTNPSNMPDPSEIEYMEEPYVSAEIMVTSDYVGAIMKLCQERRGVYISMEYIEKTRALIKYDLPLNEIIYDFFDALKSRSRGYASFDYEMKDYERSELVKLDILINKEMVDALSFIVFKESAYERGRKMCEKLKGEIPRHLFEIPIQAAVGGKIIARETVKALRKDVLAKCYGGDISRKKKLLEKQKEGKKRMRQVGNVEIPQEAFMSVLKLDEEMKKKMIVLIAFIYIASMLFCGDGVGKKFVEEKFPHLTYSDKECDDSKKKELRIVEDEDTAGGILSYEELAAMENENASVRNNMLPDTDQLAFVDEAEKNGELAELKEQQNVKMPQVDMSFDNLVKNYYQVDKTTYIGADELCEEVLLGRDMSIEKSGNGPDILIYHTHSQEGYSDSLDTSEAETVVGVGDRLESLLREKYGYNVLHHKGQYDVNDRDHAYSNSLPEITEIIEKNPSIKVVIDLHRDGVAETTRLAATIDGKPMAQIMFFNGLCRTAARGPINSLPNEYLGDNLAFSFQLQLMANEYYPGLARRIYLKGYRYNMHLCPKSLLVEVGAQTNTKEEAYNAMEPLADILDKVLKMSADKWCARTDLALETQESLKKANTDMRGVNFSEKKLDNGIIVSVVTIDSENAVRATGRPKGKYVTIEAAMLSEGDEECCQAVTRELSRELKSFVKAVCDKRIYAALVVGLGNRNVTPDALGPRCVDSLFITRHIVKEYGRYAFSNENVNSVCGLVPGVMAQTGMECLEIIKGVVSEVKPDFVVTIDALAARSTKRLGCTIQLTDTGIVPGSGVGNHRDGINHGNLGVPVIAIGIPTVIDAVTIVSDAVNASRENTAKLMSPKLNGMFVTPKDIDETVKRLAGLLSEGINMAFSNDEYDDYSEMANIKSAKKRILVTETKAARNKAIKSGVKTAIKKVEAAVAANDKAAAEAALKDATSAIASAGSKGIFHKNNAARKVSRLTKLVNGLAMKTIDNDIKAGDFKKVYLLYGQERYLIKQYRDKLIKAMVSEGDSMNFSSFEGDGINQKEIIDLAETLPFFADKRVILIEDAGIFSKAGDELGEYLKDSPESTHFIFVEESVDKRSKLYKAAAKCGNPVEFKEQTDETLARWIGIRIRKDGKGMSQAAYNSFIEKTGTDMENIDKELEKLLCYCMDKDVIELSDVEAVTTEQITNKVFEMVDAIASHKQKRALELYYDLLALKEPAMRIMYLISRQFNILMNVKAMTNKGFGNKDIASKAGCPEWAVRKYQAQCRAYSLDDLKRAVRDGVAYEEAVKTGRMNDQMAVELFIVQYSADMTGTHATGSKMYGRGFGFLAFAILLVILIAECVVSKGGLSGIRRIVVLLILTSSAVFATAQFRYTSVEENRDGYMQYMTDEKSVIVWGKIYKTEYKYFSYRYYMTDCVVQPGYGRAFGRKISCGDVVVYCDSKSAHLGDYMKACGKIGLFKSATNEGEFDRARFYHSQGIDFSVKADSIRTSAGKHAWYYHRLEKLRDTLSASLLEVTDETTAGVLSSMLLGDKSYLDDEIKDLYQVSGISHILAISGLHISIVGMAFYKLLRKRRVSYTAAFVCSAALILSYAVMTGNAVSTRRAVGMFILTMLAAALGRCTDMLNSLGIMVIYLLWDNPMVLGYAGFVFSVGAILAIGIVTPLMSAPKGGKFWASVSIQLPMLPVVVMNYYELPLFAVFVNLIVIPALPVVFISGLLSSVAGCFGVMPGKLLVFPAFAVLKLYEVLCSLVMKLPGASVITGAPDGYRIFLFYAVMSGFLVAFALKKRAVECGSKEKSQILYSVQRVVCTAVLLAILLVKPKTAAQLDILDVGQGDGIFYRFESGTCIFIDGGSSDRKQLGENVIMPFLKYNGIQSISYWFVSHADSDHISGLSEVIDSGYTIEHIVVAEAAAKEKAMEELLFKAKDAGIDICLMSKGDSIEINDASGSRSTANEEADGIMCLYPGSSDTALDRNDMCLVLKLTDGRFSGIFGGDISSEVEKKLVNEYGDELSVDFYKANHHGSKYSSSADWIEALSPRWAAVSCAAENRYGHPADEAMDRLMDAKCRILYTMQSGQIKYKESAIYENNRQMKRIIIFVLTAVILLSMGGCTKKKADNTVEVFCLNMDVTSSVPESYVLRSKNSDVDKQVDELLGRLQDKPEDSRLRKAIPDEVSVRGHEEKNYNCTVDFSKEYYDLTAAQEVLLRASVVRTLTQLDSISYVTFTVNSIPLVDSDDEIVGSMGADDFVENPGEQINTSVKETLTLYFADKDGTGLEKQTRVIHYSSNIALEKLVVEQLIEGPKGSKLKATLPGTTKLINVSVADRICYLNFDSSFRNTIDNKLTEDVVLYSIVNSLTSLPTVDKVQISLDGENDGMLLYNYKLSDMYEFNKDIVDSDDSTEKTEKMFKSKVHFAFYKSLKSRLIFMIFVLVLVPEVVLCFGILNTYESRAVSIRESEVLSQAKILANKISTSKYFDEDGGDLSNIDAQIDTLTTIYEGRVLIVDKHFKIIKDTYNLDDGNTIVSEEVIKTFSASEITNYDSKNHYIELSVPISNPNDKDSKIEGALVVSVSTDNISLNMSYLTQIAVTVAIIAGAVVLFFGVLVLLHLFVPIKKLSDEISDIKDGFGKEQLDVDDYAETAIISRNFNELMSGMKVMDESRQEFVSNVSHELKTPLTSMKVLADSINSMGDEAPIEMYREFMGDITSEIDRETKIINDLLSLVKMDKSAATLNIESVNINDLLEQIMKRLQPIADKQQVELVLESFRPVTAEIDEVKLTLAFTNLIENAIKYNDNETGGYVHVSLNADHQYFYLKVEDNGIGIPEESLEHIYERFYRVDKSHSREIGGTGLGLAITRSSILMHRGAIKAHSVMGEGTTFDVRIPLNYIVMAKKVLVVDDEKLIVKGIRFSLLQDGMEVDCAYDGEEALNMAKANSYDMILLDVMLPKMDGFEVCQAIREFSDVPIVMLTAKGDDMDKILGLEYGADDYITKPFNILEVKARIKAIMRRTSPERAPQVQSSVIEKGDIKLDCDSRRLFINDNEINLTAREFELLEILIKNENKVYSRESLLKIVWGEDYPGDVRTVDVHVRRLREKIEANPSEPKYVHTKWGVGYYYNQKMKKIILLSAFILTIAFGLCGCKKDDATVHFASETEQTAVVSSDVNRQTADSKEKKASSDGEQEQKAKDTADDTDESTEWCVYICGQVANPGVYRVKPGARVCELVDMAGGMLETADKSFWNLASELYDGQMLYFPTVEELKSDHIPEGTYTTGIDGSLMKGGAEEHIGVKDGKLNINTATVEQLMALSGIGESKAKSIVEDRAKNGLFSSIEDITRVSGIGEAMFNKIKDDITVNMSNNMDKQSYIDEAEKELLHTYNRFSLVLDHGEGVHLYDTDGNAYLDFAAGIAVCALGYSNEHHKEALKAQVDKLLHTSNLYYNAPVIEAADKVLKASEMDRIFFTNSGTEAIEGAIKAAKKYAFTRDGHAGHEIIAMNHSFHGRSIGALSVTGNAHYQEPFEPLMPGVKFADFNDLDSVKAQVTDKTCAIIMETIQGEGGIYPAKKEFIEGVRALCDEKDILLILDEIQCGMGRSGEMFAWQNYDVKPDIMTCAKALGCGVPVGAFLMTQRVADKSLAPGDHGTTYGGNPFVGAAVSAVFDEFKRLDIVSHVKEVAPYLEKKLDELVAKFDCLTARRGMGLMQGVECSLPVGKVSAEALNQGLIVITAGSNVLRFVPPLVIEKSDVDEMIEKLETTLVILSKSLMADKNMEQVMEKAQVLIEALPYIQRFNRKIIVVKYGGSAMVDEQLKKQVIQDVTLLKLVGFKPIIVHGGGKEISKWVGKVGMEPVFVNGLRKTDADTMEIAEMVLNKVNKSLVTLVEELGVQAVGVSGKDGGLLKVKKKYSNGEDIGFVGEITDVNPKILYDLLEKDFLPIVCPIGLDDEYNTYNINADDAACAIARAVSAEKLAFLTDIEGVYKDPSDKNTLISELTVSDAKKLIGDGFIGGGMLPKLNNCIDAIDNGVSRVHILDGRIAHCLLLEIFTNRGIGTAILGDSEEKFNNEQMSNENKYEIRVMTIDDYDEVYSLWQTIHGFGIRSIDDSREGVLRFLKRNPTTSVVAVEDGKIVGAILCGHDGRRGCLYHVCVDEHYRKCGIGKSMVVACMRALQAEHINKVSIIAFKVNELGNHFWKEEGWTFREDLNYYDFTLNEENITRFNKMYDASDPFYMVMQKYNMKRGNTMIKAGIIGATGYAGAELVRILMNHKEVEIAWYGSRSYVDENYADIYGNMFQIVDAKCMDDNMEELAESVDVIFTATPQGFLAGVLTEDILSKVKIVDLSADFRIKDVATYEKWYKIEHKSPQFIDEAVYGLCEINRDKVTKETRLVANPGCYTTCSILTAYPLVKEGLIDTDTLIVDAKSGTSGAGRGAKTPNLFCEVNESMKAYGVASHRHTPEIEEQLGYAAGKEIFINFTPHLVPMNRGILATEYATLKKKPDGTLPTYDEIKAVYDKYYANEKFVRVLKKGVCPETKWVEGSNYVDVNFVIDERTGRIIMMGALDNLVKGAAGQAVQNMNLLFGFDEAEGLNMVPMFPMKDKVVLAYSGGLDTTAIIPWLKETYDYDVICCCINCGQGEELDGLDERAKLSGASKLYIEDICDEFSEDYIVPCVQAGAVYEHKYLLGTAMARPGIAKKLVEIARKEGAVAICHGATGKGNDQIRFELGIKALAPDIKVIAPWRQDNWKMDSREAEIEYCKAHGIDLPFGTDSSYSRDRNLWHISHEGLELEDPSQEPNYDHLLVLSVTPEHAPDEGEYVTMTFEKGVPTSVNGKKMKVADIIRELNRLGGKHGIGIIDIVENRVVGMKSRGVYETPGGTILMEAHDQLEELCLDRATMEVKKEMGNKLAQVVYEGKWFTPLREAIQAFVESTQEYVTGEVKFKLYKGNIIKAGTTSPYSLYSESLASFTTGDLYDHHDADGFITLFGLPLKVRAMKLLELENKKNNMENEATVSKNFIEQIIEKDLAEGHCKTVKTRFPPEPNGYLHIGHAKSILLNYGLAKKYDGQFNLRFDDTNPTKERLEFVESIEADVKWLGADWADRKFFASNYFDKMYECAVGLIKKGKAYVSDLTPDEIREYRGTLTEVGKEDPYSKRSVEENLDLFERMKNGEFEDGTKVLRARIDMSSSNINMRDPILYRVAHMTHHNTGDKWCVYPMYDFAHPIEDAIEGITHSICTLEFEDHRPLYDWVVIECGFKNSPEESPKQIEFAKLYLTNVVTGKRYIKRLVEDGIVDGWDDPRLVSIAALRRRGFTPESIQNFVDLCGISKANSSVDYAMLEYCIREDLKAKRPRMMAVLDPVKVIIDNYPEGQVEYLEVDNNVENPELGKRKVPFTRELYVEREDFMEEPPKKYFRMFPGNEVRFMNAYFVKCNSCVKDENGNVTEIHCTYDPASKGGNSPDGRKVKGTIHWVSAEYGKQVTVRLYENIVNEELGVYNEDGSLNLNPNSLTVLDNCVVEPELMKAKAYDSFQFVRNGFFCADCKDSKDGQPVFNRIVSLKSSFKLPTAKMNWLNKLEQKYGSKAIPNITRIFIAANLIGSVLLLTKGDVVLYYLQFSASAILHGQVWRLISWIFVPSGSISFLQLLFIFCLWTLGDSMESYLGSFRMNVYFFGGFLLYDIVGMLVFAVTHVSINLTMYYILIAMYLMLGLLMPEAEVRLYFVLPIKMKWMVLVYFVMFAYDVYTYMSFGWQIGLAYGSEIVLALINLLVFIYGCKHRLSFRQNMHQKRRKAQFKAQFSEPRPGSGISRHKCYICGRTELSNPELTFRYCSKCTGNKEYCQDHLFTHTHVMENNSLHKLGIDIGSTTVKIALLDADDNILFSDYERHFANIQETLESLIRKAYDKTGDLSVCPMITGSGGLTLAKHLEVPFVQEVIAVSTALTHYAPQTDVAIELGGEDAKIIYFEGGNVEQRMNGICAGGTGSFIDQMASLIQTDATGLNEYAKSYKAIYPIAARCGVFAKTDIQPLINEGATREDLSASIFQAVVNQTISGLACGKPIKGHVAFLGGPLHFLSELKSAFIRTLNLDDEHTIVPENSHLFAAIGSALNYKDNSVTTLSSLIDRLSNGIKMEFEVARMEPLFKDQADYDEFTTRHGNNHVKTGDLSTYKGNCYLGIDAGSTTTKIALVSEDGDLLYSFYSNNNGSPLATAIRSIQEIYAKLPEDAHIVHSCSTGYGEALLKAALKLDDGEVETVAHYYAAAFFDPKVDCILDIGGQDMKCIKIKNQTVDSVQLNEACSSGCGSFIETFAKSLNYSVQDFAKEALFAKNPIDLGTRCTVFMNSKVKQAQKEGASVADISAGLAYSVIKNALFKVIKLSDASDLGENIVVQGGTFYNDAVLRSFEKIAGVHATRPDIAGIMGAFGAALIARERHEADYKTTMLTIDQINELTYTTKLARCQGCTNHCLLTINKFSDNRQYITGNRCEKGLGKEKNKDNIPNLFEYKNKRIFDYEPLDPKDAPHGTVGIPRALNMYENYPFWAIFFKRLGFSVVLSPQSTRKIYEMGIDSIPSESECYPAKLTHGHISWLIKQNVDFIFYPAVPYERKEFPDANNHYNCPIVTSYSENIKNNVDEITSGEVKFINPFMSFESEETISQQLVATFSKGDFNLPESQIRDAVAAGWKELAMTRLEIQRKGEEVLDYMEDTGRRGIVLAGRPYHVDPEINHGIPELITSYGICVLTEDSVSHLGELERPLIVMDQWMYHTRLYSAANFVKTRDDLDLIQLNSFGCGLDAVTTDCVNDILTGSGKIYTCLKIDEVNNLGAARIRIRSLLAAIRVKETKHEKRDLKPSNYERVVFTEQMKKDNYTIICPQMSPIHFDLLVPAFKAAGYNMVIPDIPARECVDVGLKFVNNDACYPSLIVVGQIMAAVKSGNYDMTHTAILISQTGGGCRATNYIGFIRRALEKAGYPDVPVISINMVGLEKNPGFKFTPSLIQHGLYALEFGDIFMRCLYRVRPYEKEPGSANALHEKWKKRVIDFVGNTKMLSHKKYKKMCREIIRDFDNLPMTDEVKPRVGVVGEILVKFLPAANNYVVDLLEAEGAEAVVPDLTDFLLYCCYNTNFKADYLGASKKAKFMNNRLIAFFEWLRKDARDELAKSKHFEPTAHVQDLAEYASPIVSCGNQTGEGWFLTGEMLELINEGVTNIICAQPFACLPNHIVGKGVIKRIRHDHPDANIVAIDYDPGASEVNQLNRIKLMLSTAQKKLKKMKLKTGQKCAFGFGAFGKDIVYMLISSYLLYYYNVVLGMSSVFIGTVMMAARIFDAFNDPVMGIIVAKTRTRWGRFRPWIFAGTVLNAVTIYALYATPESMGDSAQRVWLTVFYFAWGITYTLMDIPFWSMIPAITEPGSDREQLTSLARTCSGIGDAIPTVLTMTVVPILGAGSSMADYRIGFKWWALIIAVVFVISELVCVACVPERPVACDEKPGKISDMFKALFKNDQAMTVVVSIILVYTSLNICGNLVLYFFRFDVGNEGAYSIFAAVAFAAQVLVMMVIPLLRKRFSKSQLFISGFIIQIAGFAVILIMAFAKLYTPQSWYILCLPGILIYLGYGMLNVIMTIFLSDSVDYGEVMNGTREESVIFSMQTFTVKLASGVAVFLAGLVVDWIHLDTAAAVQTQDTLDALRMWMTIPSVILLIVGIFVFKRFYKLNDTRMEELKSKLNMKLPVGIENFEEIRKLGFYYIDKTRLIEQLLQGWGKVTLFTRPRRFGKTLNMSMLRSFFEKGTDKALFEGLYISGNKELCDEHMVKYPVIFLSFKGVDGLDFTTARRMLCAILKDELDRHYYLKNSDVLTDEDRTLFTKMLHGQDDNIEDSIRMLSKLLYKHYGQKVVILIDEYDVPLDKAFQNGYYKEMVSLIRGLFGQALKTNEFLQFAVLTGCLRVSKESIFTGLNNFEINSIVDIDHDEQFGFTDDEVMKLLLDYDRSERYPDAKEWYDGYHFGNADIYCPWDVINFAKKLVSDPSARPSAFWINSSGNDMVKRFVDKADRTTRDEIEKLVAGGFVEKQLRLDLTYDEIDNTIDNLWSVLFTTGYLTKIGEVKVPDSESYAYKLVIPNKEVREVFILQIQEWFKAVVANDDDTMKLLSKAILDKDEKQITRQLNIVMSRMISILDTKAPDAMKENFYHGLLLGLLRGSNPDWLIKSNRESGDGFSDILIEPEDPDAGIVIEVKYAKEMKELDAACETAMAQIKNKRYDEALRDEDRCDILAYGIAFCRKRCRVVGEKLYVAVNSINQYHIFIHTNSVEVLKYECGIKQRIRGYEERMKNDEPEIKPAYKNPLIEHYECDGQINMFRYLDKMQIFVDADACPVVDIIEKIAEKYNIKTTLLCDTNHVLYSDYSEVIVVGAGADAVDYKLISLCHRGDIVVSQDYGVAAMALGKGAYAIHQSGRWYTDENIDRMLMERHLNKKVRRSSHKNHIRGPKKRTEKDDERFAQSFEKMILMAKSKEDMKTAIVYASVHHGNTKKIIDEIAKTNDVELIDATQTVEKDLSEYDLTGFASGVYGGKFHQSVLKFASVNLADNKNIFLICTYGGRPVFKSIEQVIAYKHDTIVGRFSCKGFDTFGPFKMIGGVSKGHPDEKDIAAVVEFYNGLKLKYDMKLICSLFITFLKIGAFTFGGGYAMIALLENEFVEKKKWLEKSEFLDMVAVVESTPGPVAVNSATYIGYKIAGFAGATMSTLAVCIPSFFVIYVISLFFDQFLSLRWVSCAFRGIQVCVIYLILTAGLKMLKSIDKNTLNLTLLTLVMASMLCCSITAVSFSSVFYILICGAVGLVVFFLRKIRKGDGKTSMIYLRLFLNFLMIGALSFGGGYGMVSLVRERVLSNGWLTENEFLNFIAVSESTPGPLAVNMATFIGSTQGGILGSFVATLGVVLPSFLIILLIASALKNLMKYAPVNAFLSGVRPCVVAMILATALSMALSTLFGFTDLQAGFAPDLRSIAVFAMLGATHLICKIIRKTAPSPILMILFSAGLGILFWMTDEQYMRRAIELAKRGMGYTSPNPMVGAVIVKDGRIIGEGWHERYGELHAERNALKHCKESPQGADMYVTLEPCCHHGKQPPCVEAVIEAGIKRVYVGSDDPNPLVAGGGIKILKEHGIEVVTQVLKDECDRLNDVFFYFIQTRRPYVAMKYAMTMDGKIATYSGLSKWITGEKAREHVQNLRHRYKAIMAGIGTVLADDPLLTCRIEGGVNPIRIICDTHLKLPLESQIVNTAKEVPTIVAVSERYRENAQSEALPDTEKDSIEENNNYQKNRKITRLEENRIEILYVAEKNGHIDLNDLMQKLGERSIDSILLEGGGILNWSALKSGIVNKVYAYIAPKLFGGANAKTPIEGMGADSPAHAVMLGNSKVTKFGDDFLIESDVVMFTGIVEEVGTIDTISRGANSAVLTIRAEKVLAGTKVGDSIAVNGICLTVTRLMPHAFTADVMHETLNRSSLANAMRGAHVNLERAMAADGRFGGHIVSGHVDGTGRIVEVKKDDNAIWYTIQATPQLMRYIVEKGSVTIDGISLTVAKVAQDNFSISAIPHTVSQTVLKDRKVGAVVNLETDIIGKYVEKLLCKGQPEGITEEMTGAQTIKENALHKSGENKPDGITRDFLAKYGFMKFNTVEEALDELRAGKIILVTDDEDRENEGDFICAAEFATTENINFMAMHGKGLICMPMSQEYVKKLRFPQMVQENTDNHETAFTVSIDHVSTTTGISAAERSITAMKCVSDDAKPEDFRRPGHMFPLLAKKNGVLERNGHTEATVDLCRLAGLKECGLCCEIMREDGTMMRTTELMELAKKWNIKFITIAALQEYRKIHEKLVDRVTEVKLPTKYGEFKAYGFVNRLNGEHHVALVKGEIADGSDVLCRVHSECLTGDVFGSQRCDCGQQLEAAMRQIDEEGRGILLYMRQEGRGIGLINKLKAYELQEQGMDTLEANLALGFAGDEREYYIGAQILRELGVHSLRLLTNNPDKVYQLSEFGMEISERVPIQMSATAHDLFYLKTKQKRMGHILSYMNVIEGKMTQDGIKVGIVVARFNEFITSKLLGGAKDGLVRHDVPEENIDVAWVPGAFEIPLIAKKMAKSGKYDAIICLGAVIRGATSHYDYVCNEVSKGIASVSLESEIPVMFGVVTTENIEQAIERAGTKAGNKGYDCALGAIEMINLVRQIGMLDETGFYAPSVAHNALPGRPWPGISVFLGHNSTVSMQLRYSQAWECVCAAGCPALTPLTLMIDIHCHLLYGVDDGSKSLEESVEMLKIAKKQGITGIILTPHLRHGMFKHPLEKIERHYKKLMPYANKLGIELKLGTEYHVATDMIDAFHGGLCHTLADTQYILTEYSHSSEYSFVYKMTREAIFAGYIPVIAHVERYECLSDISRIEDLQELGALIQVNADSVLGIDGRHFKRYTKKLLKAGLVDVIASDSHGTKERVCNMKKCYEYVAKKFGDDYAQEIMQTTPENIINGRMEREQDFDNEIEIDLKDLFLEIISYWQWIILVTIATGAVAFAISRFMITPMYESTSELYVLSKSTSITSLADIQTGTSLTNDYIVVVKGRPVLDQVIENLNLNESYKTLGGRVTLDNPSNSRVLNITVTDPDPQMAKTIADEIAKVASAYIAEKMKQDPPTIIQSGYDDGGAVSPNIGKNTVIGAFAGAFLSIAVIVVSYLFNDTIIDTEDVEKKLGMNVLGTLPLDESEDDGEQGKGRKHGRGSHRKKRKKKSASAMELVKFGKLKEQSYTMKESLRALKTNIQFCGDDIRTLLVTSSVPNEGKSTVALDLARSLTESGNRVLFIDTDMRKSVLAGRLRATVASGGEICGLSHYLSGQRRLEEVMYGTEIPGLFMIFAGPSVPNPTEILEKKYFQELLNFGKEHFNYIIIDCAPIGAAIDAAVVAKYCDGAIIVIGQGMASARMIQSVKKQLEASGVRILGAVLNKVNNKKNSHVSGYYGNYYGSYYGQSDKAMKSIDVELGKSNMLPLIASQQFYASWKVFIRELLLNAMDACNVRQALEWSWGTEFLEMEQASQMRDVRAIYEPRIDITYSSDTRLFTIEDNGVGINEYDLEHFIAQIGASYYTSTDFFNQQLKYEPYSHYGIGLCSCFTVSKAVLIESKKDKVINTAWNISNPQDTAPVMAKWFGESGQIEYVISQKKTPGTRISIPVKPSYAPYIDLDFIVETIKHYMLTLPIPVNIRCDTREVCLSQPKAKWNYPMNELVGMNIIRVDNSLLEGYVAIYHPKHKGYFHKSTLYQQGVLVSDATDILGLAPSWIDNFSYQLNIKKRFLNISISRDGAAFDEKLIELRQYIGQIIIDTFGQSPLTLGQYLSDGRKRLVCEYEAENELVSRAVQVLVYIKEREVEVPVRTVINGFIGRKIKIAFMQKALFAHYRENYPYDYGQFIDKYDIIVFEQNIRAFWQFMTPYITSMEYVMGDMPGIIYTDVSADLTVAKTAASYRNDYVLRPEYYDLDPVFCLVSNELTDPMELVINTHNRNAMLLQRAEKYKKVRIARAVIIENIKQRILGNASRWNSIIDFGGELVHQYELEKPMSLQAQWCLERDFPDEINAYIAKTFTDREIADYGLTSLYFTRKDFIKWWMAPMEILDLNNEEDTKTTDEMEQKKPEEKTSPVKEILSWVLTIAFAIVAAILIKNYVIINANIPSGSMENTIQIGDDIFGFRLAYTFSDPKRGDIVIFNAPDSPSEKYIKRVIGLPGETVTIEDGQVYIDGEALEEDYLKSNQSGEDPWTVNAGPYEFKVPQDSYLLLGDNRNGSSDARVWEHTYVSKNDILAKAIFRYYPFDRFGAVKMPEIETDIEKRNKYGMLCGIVGIFLNLILFAGKLFAGMLSGAISITADAFNNLSDAGSSIITIAGFKMAAQRADEEHPYGHARMEYVATLAVAAIILIMGFELFRDSFGKIIKPQDIEFSWLIVAILLASIAVKCVMAVYNFYFSKKLDSSTLEATGRDSLSDCIATSVVLAATLIAHFSGLNLDGIGGVFVSLFIFYSGISSAREAIDPLLGAKPEPEFVDRLKEMVLDFDKNILGMHDLMVHDYGPGHRIVSFHAEVPEDGDMVELHDIIDNLERRIRRELGCIVTIHMDPVAIEDEEVAGLKAEVLSVIKGLDSHINMHDFRIIRGDTHTNLVFDIAVPFGYITSDDDICNAIQENVRKKLGKNYYTVIEVDRDNYINIMQIYGVFAVMACCTFVVVTLMQIVVLSQNAYIKKLNDMYSDGKDCMLKSNLTEEELREIEESIDMNEIDKELENVNFQHDPNMSNVKRKDSKNRNLRNGESQRKDGRYVYKYTDIYGKPQFIYSWKLVPTDKTPAGKRDDISLREKEAQIKKDLNDGIDIAGGKMTVCQLYDKKNSQRKNIKRATEKGRQYLMNALKNDPLGMRAIDTVKQSDAKEWAIRMSEKGYAYKTIDNYKRSLKASFYMAIQDDCIRKNPFEFKLSDVLEDDTEQKVILTPEQEERLLAFMEKDKIYSKYYDEVVLLLETGLRISEFCGLTTHIDMQNRILNIDHQLLKDNEIGYYIETPKTKNGKRELPLTERAYQAIQRILKNRGKAQPLIVGGYSNFLFLNREGLPKVAGNYEGMVRGLIKKYNKYHTDKLPNITPHSFRHTYCTNMANRGMNPNTLQYLMGHANITMTLGYYAHGTFQSAKAELERLACMNNTDVPIWEKYTLTIEEASKYFRIGEKKLRKLAEENIDAGWVIVNGNRIQIKRKQFEKIIDTLDEIMNNTRPSFYLISSAVDGNVNSIEKILAFYDPYISKCCLRPFYDRYGNVCIVVDMELKGRIREALIKMILDFDIPLETEEMKPSDFQKTIQCQFDCKLKRVVKGIVRNYRKELKRRRNKEISYCELPEIVVEKLAVWDEYESDYTAFDVCGIEVRVLDDDLAEAIKYLSEKDREILLMYFFLGMSDTEIGDRLKINRSTSFRSRKNSLEEINKKLKENMNDEMIGLKKRDIKKALKAGAKAGGMSLADVRENIEATIDEAMNSTDPEVHANFKKYFGNKRPTPEEYIYKITKKTKVMKKYEYLEIDYTAKGVVFLCTDKHKKVINSYAENGYRYVGFIPTEIDAKGCMRKIDLIFEKEDMDLTILVVGLILGVGIPLRNKAIKKRRENMKEKGNEEKMKGLLIKDFKLLKGQKNFFMAITAISIIMIIVSPGTSFPIGLLGFVGALFSLSSISYDEFDNGNAFLFSLPITRKDYVLEKYIFGLISGIMFLLLGTVISLVAIGITKTGSFNEIFLTAGSLFPTILLILSIMLPLILKFGGEKGRIAIIGVMGLIFVIGLLLIKTTEYLGIDLYDLINKLPKFEPLVYIILFLLFSVVILGISYLISLTILKKKEFMLKIEHLKKSYESFSLDCSLEVKKGHVTGLIGQNGAGKSTTFKAILGLISFDSGTINILGKSLQDFTAKDKQDLGVVLSDSGFSGYLTINDIIPIIDNLYQNFDKSFFIEQVKKFQLPRNKRIKDFSTGMKAKVKVLVAVSHNAKLLILDEPTAGLDVIARDELLEMLRDFIEKDEERSILISSHISSDLETLCDDLYMIHQGKVIMHEDTDVLLSDYALLKVDEEEYSKLDRQYILRTKKESYGYSCLTNQKQYYAENYPQMAIEKGNIDEVITMMIRGVEMKIIINHSSMIPIYEQIVEQVKALIRNGKLKENDNLPSVRSLAKELKISALTVKKAYDNLENEGFTVTIHGKGTYVTATNTELLLEEQKKELESDLERIIQKGRCYGISDEDIKKLFELILEGMFKKNKKQTETIKEPKEKKVRTVKVGTHKKTVIALWVVLIASVSFGVYKNFTAIDQHTTHEKEIIELRLQDTNGIENFVKNFAKSYYTWNNSKEAIEARTQAINGYLTKELQDLNVDTIRTDIPTSSTVTNVIVWSIEQSGTDTFSATYEVDQQIKEGEQTSNVKATYTVKVYVDADGDMVIVQNPTLAPAIEKSDYEPKTPEADASVDADTVNDATAFLETFFKLYPTATEKELAYYVAGNVIEPIGRDYLYSELVNPIFTKDGDNVKVKVAVKFLDNQTKATQMSQYELVLHKDSNWKIVGMKLKHIALIGSLFPILFSLVLFFGVLISADSDDENSNFSSGITGMNLSAEVLKHQPMVEKYAREYGISEYVNVLLAIIQVESGGTAEDVMQSSESLGLPPNSLDTESSIKQGCKYFASLLSSCKNQGIDDLNVAIQSYNYGGGYVGYVAGKGKKHTFNLAESFAREKSGGKKVTYTNPIAVVKNGGWRYGYGNMFYVELVNQYLTVPQVSGELAQKVMNEALKYQGWKYVYGGSNPNTSFDCSGLTQWCYGKAGISLPRTAQAQYDATQHLPLSQAKAGDLVFFHSTYNAGSYVTHVGIYVGNNQMYHAGNPIGYADLNSSYWQQHLIGAGRVKQMKERIKGAFTKKKIFHFLKMALFVVVLSLILLSLLGTVAHATGLVDDTINAENLYSKYPLSNYQLDFYVDNSWSWLPWNWLDGIGKSVQYGLYCITNFVWTISLYLSNATGYVVQEAYKLDFINDMADSIGKSIQTLAGVTQNGFSSTGFYIGFLLLIILVVGLYVAYTGLIKRETSKALHAVINFVVVFVLSASFIAYAPDYIKKINEFSSDISTASLDLGTKIMLPNSDSEGKDSVDLIRDSLFSIQVEQPWLLLQFGNSNAEEIGTDRVEALVSASPEDEDGKTREEVVKTEIEDNDNNNLTIPQVVNRLGMVFFLLFFNLGITIFVFLLTGMMLFSQILFIIFAMFLPISFLLSMIPSYESMAKQAIVRVFNTIMTRAGITLIVTVAFSISSMFYNISTDYPFFMVAFLQIVCFAGIYMKLGDLMSMFSLNANDSQSMGRRIFRRPYLFMRHRARRMEHRIARAVSAGGISGGVAGAVAGSAVAGKRAERKNTASKENRGNTTSSMGQRAGSKVGAVLDTKNKVKDKANAVKENIKDMPTQTAYAVYSAKEKAKSSVSDFKRGMVQEQQSRQTGRLEKQEQRRQNIADKRMELQKAQEARQAQRKADGSATTGATRPHERPATASTIPKPSVEKMQEVKRPATATTSKISEPVKTSVIKERPLSSGVSDRKATQPTQTVHRQNVEKVVSQETRQNYTKDRRTKVQQTQSVQKNQQTTENPRNLVTKKGQKKKMFPIKYIDNNLVWNKDNEVFAYYELIPYNYSFLSAEQKFIVHDSFRQLIAQSREGKIHALQIATESSIRSMQEQSKKLVTGKLKEVAYQKIDEQTEALVSMIGDNQVDYRFFLGFKLMVTEEQLNLKNIKKSAWLTFKEFLHEVNHTLMNDFVSMPNDEINRYMKMEKLLENKISRRFKVRRLEINDFGYLTEHLYGRDGIVYEDYEYQLPKKKLQKETLIKYYDLIRPTRCVIEESQRYLRLEHEDKESYVSYFTVNAIVGELDFPSSEIFYFQQQQFTFPVDTSMNVEIVENRKALTTVRNKKKELKDLDNHAYQAGSETSSNVVDALDSVDELETDLDQSKESMYKLSYVIRVSAPDLDELKRRCDEVKDFYDDLNVKLVRPAGDMLGLHSEFLPASKRYINDYVQYVKSDFLAGLGFGATQQLGETTGIYMGYSVDTGRNVYLQPSLASQGVKGTVTNALASAFVGSLGGGKSFCNNLLVYYAVLFGGQAVILDPKAERGNWKETLPEIAHEINIVNLTSDKDNAGLLDPFVIMKNVKDAESLAIDILTFLTGISSRDGEKFPVLRKAVRSVTQSDSRGLLHVIDELRREDTPISRNIADHIDSFTDYDFAHLLFSDGTVENAISLDNQLNIIQVADLVLPDKDTTFEEYTTIELLSVSMLIVISTFALDFIHSDRSIFKIVDLDEAWAFLNVAQGETLSNKLVRAGRAMQAGVYFVTQSSGDVSKESLKNNIGLKFAFRSTDINEIKQTLEFFGIDKDDENNQKRLRDLENGQCLLQDLYGRVGVVQIHPVFEELLHAFDTRPPVQRNEVEMKKIKSYTGIWNVEKVLYAINDFNLPFPVTFTQITWFVITEFIIILFGDIPPLSMIEGAFLKYFGIPVALTWFMSQKTFDGKKPYSFLKSQITYALRPKITYAGKAVKLHKQILNETITAVRSVNYVPDKIYMIDDMAVYIANLGKYNEGYLVGAWFTFPIDEEDVKEKIGLNEEYEEYAIHDTDNFPIAIGEYVSIEELNEMYEMIEELPDYIVECLDEFISHYGTLEEVVEHKDDIYYYPDCETMTDVACYYIDELQALGDIPPSLQNYIDYEAYGRDLDMGGCFIETSRGMCEIPYMQETRVLVETRGTTGEETISYWFDLPIDVAEFEEKLGVVAESGDYRIIEKVLPYADEIHEHTSVYQLNELDFMYRQLSSDMQEEYVSLLTVFENLEALYICRNVITVYPDCKSMIDVARQKLMNDPTFKHLSEDCQEYYFDFEAYASHLQEHGKFLVTEHGIFELPEMLGFSIMMWFVSAILIFVSISLLKGNYSFVHGKVFDTTDNKKGYAKELGKPVLFVGIGILVSGVIAIIVKNHSIPTAVFFLAIIAGIAGLWLHKIQKNFRKFMNFGQNLYQWFLSNAQSLVLMAIVVIGIYLGFKREFSKLIGFLVVALIAVGLVFNAGGVKDVLLELFNKIIGAMWVLLKDFLLVSMGMGIGVVLMCILNVGKEADYEMKQLEESEDNMVLNEEQWIKELREKRIAYGISQGKLAVASGITREYLNKIESRKMKPSKELLNTLHKELARFNPEAPLTMLFDYVKIRFPTLDIQHIIKDILKLNINYMLHEDYGRYSYTEHYSLGDIFIYTSADEEKGVLLELKGRGCRQFESYLLAQQRSWYDFLMDALIDGGVMKRIDLAINDHTGILDIPELAEKCRKREYIGKSRSYKFYQSGELIKHREDDREYMGRTLYLGSLKSDVYFCIYEKDYEQYVKLGTPLEEADIINRFEIRLRNERAYYAVRDLLTYYDAEQTAFSIINQYVRFVDEEPDKRKNDWKLNDRWAWFIGDNRQSLKLTTKPEPYTLDRTLRWVQRQVAPTLKMLKKIDKGNGTDYMETIEQQAKLTEKHEMIIKQQTTPAKDLVESMLDCFLNYSVNPNLRFHSRIDKIIDDVIREKINIPHKFRMRLESRHCIESRIIYFRFRVLDKSCLQCNVFLKGLSDEMKEALSDERIDFAVLYEGIQGSQQDTDTDDKDGFCGSQPQVPFLADGACPVRMRKIWNKGHRIRASDKHLVYHFSIGTLLFVFVAVLLLLNMKQLMRTDWEHFSLLENGLTLSPYNFIAILIATGVCALVAFLYYRFCYDGFKKLLHRQKLARMILENKWYEADTVQDSGFFTDLQSRSREKIVWFPKIYYQMEKGLLHIRCEITLGKYQDQLLRLEDKLESGLYCELTDKTLHDGYIEYTLLYDMIANRITIDEVRAENGCLKLMKNLVWEYDALPHALIAGGTGGGKTYFLLTLIEALLHTNAVLYILDPKNSDLADLGTVMPNVYHTKEEMIDCVNAFYEGMVQRSEEMKRHPNYKTGENYAYLGLPPCFLIFDEYVAFFEMLGTKESVSLLSQLKKIVMLGRQAGYFLIVACQRPDAKYFSDGIRDNFNFRVGLGRISELGYGMLFGSDVKKQFFQKRIKGRGYCDVGTSVISEFYTPLVPKGHDFLQTIGRLAQERQAMPEQQGKEDVIEMLPISDILIRSISGYVFIIPVLILYFFIRKKSGRKQSIFHIIAVFVFCYYLFGILTVTGIGYTSTISFRPQISIIPFCGMISGPIDTILNLVLFVPLGFFLPLLYKKYQHIKNVILTGFLFSLSIEIVQMFGWGATDINDLIINTAGACLGYLIYYLVSKILPINFRKRLQSENVNDMVEIMLYAIYIFIVMITVQPWVIHSLLNIGMRLSNGFVIDKEKTFGELKFTAVRDVFLQNEDGTPSTQLKKRIYDLKCSLHGGIIPVSVPPEVPLREFPYNAVVELVNPVADTVSRKTYTGADVDWYVKAEDIVLKNKGNQNAGSPQNHTPQGQPKKMEMKYVVPDMAQSFGTLEFAGESEPVFERDKNNRRVLARRSYNLYSDVQKGENVVVEIPVQAGEKKFQYEQKVKIVNPKLYGRGYAIGDMGHTDYVLVADDIVAVEEKMKKTWKRLCTGFLALATVVTALPSTPVHAESKQYWTESAERVGIIEKVMNDGSIGSTFNEGMMKVEGETAYCIDINTDFKNGYKTRADASSRMSADQISDVALSLEYVKQYGEAHKELNYKQVYLLEQCVVWQRLSVHLGWQCDNVRASYDEIPKATQDEVFSGAKAFVKENKGRYECGGYIYSGEGQELGQFWTKLNVGNAKLQKTSSNTSITNGNGNYSVAGAIYGVFSDKDCTKQLATLTTDENGNTDVVEVKAGTVYIKELSAPAGYKVDTNIYSLKVEAGKTAILKVSDTPKVTDTLIELFKIDMETQKDNPQGNASLAGAEFTWKYYAGFYNKDNLPAEATRTWVTKTIAETDSDGTTHYIAKLADAYKVSGDSFYMQDGKAVLPLGTLTVEETKAPNGYLLDGAYMQAGDKSEQIKGLYVTQITEDGDLAVLTGSNQFSVSDKVIRGGVKIQKRDLETGDTKPQGSATLKDTAFDIISLNDNAVLVEGKLYKKNEVVKTIHTDIEGVASTSSDLLPYGKFRIVESEAPDGYLTDGAKPIDFTITENGKIVDLTDEAHSIYNQIKRGDIEGVKIGAGTHKRLANVPFRITSKMTGENHVVVTDDNGQFSTSAEWASHKHNTNAGKTSEDGVWFGTSEPDDSKGALPYDTYIIEELRSDSNKGFELIPPFEIVVSRNNLVIDLGTLTDEYEKEISIHTTATSKDGEKTILAGKEITIVDTVKLDGLTKGTKYQLKGWQMLKEENTELIIDGKRVENDYTFVADKEEMKVEISYTFNASALGGKNLVTFEELYDLSNPDEPVKVAEHKDIEDDGQTVLITERIIKIHTTATDKDGNKEIEAGKDVTIIDTVTLEGLEIGTQYKLVGWQMLKEENAELLINGKRVESDYTFIADSETMKVEVAFTFDATSLDGKQLVTFEELYDLSNPDEPKKVTEHKDIEDKGQTITFKEKTEVPEEPEKPETPQTPEKPSRPSDSPKTGDNTNLYGLLALLLTSGAGLAGIFFYKRRKMKKSMKKNSRLSKSRQFILLEMVFFLHTGIIGAVYTLYLLSLGLSLFEANAISAIFNIAAIVFEVPSGAMCDSIGKRKTSLFAGVTLFLAMLCFLSSVNILVTVMGQVFWGLSYALESGTIEAWFVNDGALKGNELDRVFAASSKIQSVIMIVGSFIGSWLADYSLKFIWLIPCISSVCFIIMVLKFVEDKKEIQPKSSILSLYKTSIKYIKIGGSLIVKNQRITYLYIFVTLMGFISSPLMIFWSVYLKQIDSGFSYMYLSVIWVFIQVSIIIGNQILEIIGKYIKRKKILMVTFLIFGLSILFMNIKNGVMVVIVLICIQEIVWTMICSIQRGLLNDYIDDQTRTTMISFSSLFNAIGKISASVLFGFLADSFSILFAWTISGVLSLFTIWFVHIMYKKLDMAKVAFVSIMWHSRFVEELGVEYLTAVLRKETNHEVRIFYKFPEDNYNDFFQQVIGFNPDIVGISLSHKYTGLEPLYAGASLLKEKLPEVYLCIGGIFASTNAENIMRKIQEVDCVFLGESENIIVDFVDKVINHQSIDALDGVVYRCENGTLKTIPKKNFIMDLDAIPFPARDYMEEDWFKNDPFKMVNLMGSRGCHGHCHFCNVPSMYAVYGTEHCWRGRSIANIVDEMEYLYKEHGVLIFSFNDSSFEDAMPLTEGKKRLATFANEILKRGLRILWTCCFRAETFKNNKEDIELIELMVKSGLYNLLIGVEAGNKRALNNFSKRATISDNYQSIEIFDRYPVYISKGFIMFTPQSTPSLLRDNLEFAHMSALVEASGIVLQDDMSSNPIFSSLFERLTACIVTVFIFAVNYFLSGYCDFPKWLQTIGRDSMPFYAMNVIFVGGIRIILNRAGITNMALQCICGFAGSTAICWILYECIIKKIRLINFIFYPGKQLHIRKMKFIKISAFAIVLLLLMQIVSKAFIAIDSSDIENIYGFYAEPENSLDMVMIGPSEVYTGYAPALAWEEYGLKSCNLSIGAVPCNMYKSIVTEIVKRQKPKLLVISAAAFSQGNWNLTDEVYLRKWIDNMPMSQNKLDTVKTIPKNINKDDEKVKDNISDTLYFPLEKYHGNWKDPEAVYTSFVTRAYMRLSGGGYLKGFYSKTGITGGRDNLANIGQPTKEAYMLTDECRAYLKELLSYCNKLGIEHVLLLQPPHETQAADKSGLEQIESITKEYGYDFLDLSTDYESIAGIDDSHDFADFEHLNAYGAKKLTAYIGDMAVNQYGIKSDTAKSELSRWKKSVKRTKKALKMAREYTDRGEAQVVGEYEAAKMKKKTQKNKSIKLNYIYNVSYQILTLITPLITAPYLSRVLKADGIGAYSYTYSLVSYFIMFAALGTVNYGNREISYLQEDRAKRTKTFWEIELLSVISVIVCLCAYMVFTLAFGHSPLKKHLLLIEAVYLISVASDISWLFQGLEEFGKIVGRNVIFKIINIAFIFIAVRSESDLLIYVAGICLLELFANISIWFYLPQYVDRPKLKELKPFSHLRATLTLFVPTIATTIYTALDKTMLNNITGSMTENGYYEQANKISKMVLMLVTSLGTVMLPRIGRAFSENKPDEVKALLYKSFQFVWFIGLALCFGLIGIARNFSPWFFGPGYEKVPYLIMIMATLLPIIGLSNVIGIQYLVTTKRESLLTRSVCIGAAANFVMNMILIHQLYSYGAAIASVISEVIITAVQLYFIRNELSIPKIFSLSWKYLISAVCMLIVLLLMDARLSVSFMHTMIMIVTGFIVYMVLLVLMRDEMVCEGIRLIKARIKCHMDNIIIRNRKEEFKELVLYAVFGNMTFVISIGAYAIFNVLFGINELIANALAWVFAVLFSYVTNKKWVFKVATPTKTAFLVQMFAFFSGRFITLVIEEAIIFIFITLLDYPSMWVKLAAQVVVVVLNYVISKLFVFKNRMSNRLDMKKDTNNLKDKTKCDGPEKPDSYMGNDKQWVFRALVLAFVDMCIIAISFFFALMIRFEFSYSHIPLSFLEGYLHIVPLFMVISLVVFYIFRLYHSIWRFASINEFMHIIGAFLVLTVLCVIIHEVYEIKMPYAFWIIGLMLSFALCTACRFAYRFIRTGQKMLEQRGFANGDERVMIIGAGNAGRMLIRELIMSSHLHTKACCIIDDNPAKLGRFIDGVPIVGNRNDIPEMVEKYDITKIVYAVPSTSGKDRKDILNICKDTGCDVSVVPGIYQMVDGRVSVSNLRPVSIEDLLGRDPVVVDNDGIHSFLQGKVVMVTGGGGSIGSELCRQIAREDPKLLIIFDIYENNAYDIQQELKRKYPYVRVETLIGSVRNTNRLHYVFQTYHPEIIYHAAAHKHVPLMEESPNEAIKNNVLGTLKLSRLAAEYHVKKFVLISTDKAVNPTNIMGASKRLCEMVIQMMNRQTGTDFVAVRFGNVLGSNGSVIPLFKKQIEDGGPVTVTDKRIIRYFMTIPEAVALVLQAGLYAHGGEIFVLDMGEPVKIDDMARNLIRLSGLEPDVDIQIVYTGLRPGEKLYEEMLMSEEGLKETPNKLIHVGEPIEMDDELFEKQLEMLEKACTSEAKDIKQIVASVVKTYHPDLEDMEKRQISFSPPDITEAEVSAVADVLRSDWITTGPRTKEFEKRIAKLCGTNKAVALGSATACLESILRFLGIGAGDEVITSAYTYTASASPAVHVGATLKFIDVAPDSFEMDYEALEAAITEKTKVIVPVDIAGVPCDYDRILDIVERKKALFHPSNDVQRAIGRVIVAADSAHAFGASYMRDGERIMCGNVADFTSFSFHAVKNLTTAEGGALTWRPIEGFDDEYIYKQFMLLSLHGQTKDAFHKNGQGNWEYDIVAPSYKCNMTDIQAAIGLVQLDRYDGLLKRRRDIIERYDTAFKPLGLLTVPHFTDRHTSSGHLYLLRIPGIGVDRRNALIVQMAERGIATNVHFKPLPMMTAYKNMGFDIADFPNAYHQYENEITLPLNTKLSDEDVEYIINNLLEILHEMSRWRTWGEIPTFMKNDFTLKYYRHLSRKRTSMVFKRIFDVIMSAVLLVLLSPVILVLAVWIKVDSKGPVFFRQERITQYGRKFRIFKFRTMVNDADKKGSLVTVGGDSRITRVGAVIRKYRLDEIPQLINVLCGDMSFVGTRPEVEKYVMAYTPAMMATLLMPAGITSEASIRYKDEDRLLEASDDVDYTYIHKVLPGKMRYNLKYLKKFSLTNDIRLCIETMLAVIHMNKVKFSVLLSIYYKEKPEYFRECMESVYSQTVLPDEIVLVEDGRLTDELYEAISEYECRPSEINFVTVKLEKNSGLGLALAEGIKHCSNELVARMDTDDICVPDRFERQLNAFSENPKLDIIGGYISEFSDDTHNILSERTVPLGNYVIKQYQRKRDAFNHMTVMYKRSAVLAAGNYQDCLLMEDSLLWANMIRNHCRMANIGETLVYARTGDDMLRRRGGFDYFLKYKAGRKRILKTGTISAADYFVTISAQLVVCMMPLWMRSLVFKKILRNMDFRAEYEKWCTDPYFDEATKAELKAIAGDDKEIEDRFYRTLEFGTAGLRGVIGAGTNRMNIYTVRQATQGLANYILSQGEDAVKRGVAIAHDSRNMHDEFTDATALCLAANGIKTYVFPQLAPVPELSYAVRTLGTIAGVVITASHNPREYNGYKVYWEDGAQVTPPHDTSIMAEVAKVTSFDQVKTMDKAAAIEAGLYNVISDEVEEGYFGELRKLSIHPEIIKAMAKDIKIVYTPLHGTGLRPVQRVLKDMGFENVYIEPSQAVPDGNFPTCPYPNPENPDAWKLALELAKEKDADIVLATDPDADRLGVYCKDTKTGEYVTFTGNMSAMLIGEYILSQKSANGTLPENPAFVESIVSTDMGKAIAAAYGVKHIEVLTGFKYIGEQMLKFEKTGCNNYVFGMEESYGCLPGTYARDKDAPAAVCMLCEVAAFYKSQGKTLWDGMIDMYEKYGYYREGISTMTLKGIDGAAQINEIMTKARAAEPKKFGDYQVLAIRDYKNDTRKDMTTGKVEPTGLPSSNVLYYELNDNAWCCVRPSGTEPKIKFYFGVKGVSLEDSQAKLDALSAEVLGQFEMVSRRKEVECFKCGRPQMRLTNLEFGKYTNMSEKERQDYADAWLYIHRKKEKMAKKRRRKKRRSGRKKIILFVFEILLLLIVLLVVWAYNKTLGQVKYEDALTNSEAGINEEIDEDVLANMHGYLNVALFGLDNRSNGSYDEGHSDCIMIASLNYDTKEVQLVSVYRDTYLPIGNGKFAKANAAYANGGAKRAVAMLNSNLDLNITKYVCVDWKALVDAIDDIGGLDLEITNAEMKEINYLIPEVDYTTGYNTPYLEGDGMQHLDGTQATCYARIRSTSGDDFLRASRQRIVLQAMLDKAKQSDLGSLTEMCKDIMSQISTNFTAKEIIQYATAVTKYQMKETTGFPFELTTMNLSTTGDTVIPIDLAQNVSKLHQFLFNETDYQPTETVQTVSDKIAKKTGVTSKTSAFDLTQYNDTVGSDGTEGAKKKNKDKQDALKKSQSESENGSEEKSSSDGSDDMKPEIKEKITATNQKYLKKFLTEEAPAKLESQLEHMDWSYLDMIHNKEQQRGTFSPLAAMELSEIEANKDKYLATGLDAVKNGKVGAILLAGGQGTRLGFDKAKGMFNIGKTKELYIFEQLVSNLMKVTNQTGTWVPLYVMTSEINDSMTREFFEEHDYFGYNKDYVKFFVQEMVPAVDFDGNLLMKSEDSLAMSPNGNGGWFKSLINAGLDKDLKDKGVEWLNVFAVDNVLQQIADPVFVGATIESGCVSGSKVVRKCDPYERVGAMCLENGKPSIVEYYELTPEMAEAKNENGSLQYGFGVILNYLFRVDKLMAIAEKSLPLHVVEKKVPYIDENGTEHKPETPNAYKFETLILDMVYMMDNSLPFEVDREKEFAPVKNATGTDSVETARALLEKNGIEIMDNNYRNMNDTNNTNNTNSTNNNTNNVNFTMSGNPYNPDESQKAAQTNNTSAESYSQSYNPYSQASAAGQPNANQSYANQPYSNQSYNSGTNNNAYGGTSAGSTDNSYSRMNMNGQAYQQTAKPKRQRAPRKPGAFGPFAAKTVAAALIFGLVGGGVFTGVSYIGTRAISNSSTASAKLTTTTSGGTKQTSSGDAKDLTDVSSIVDEVMPSIVAITNTGTVTYNSFFGKQSQQSQSCGSGIIVSEDDDYLYIATNNHVVADSEELTVQFDDDSVVKAEIRGTDPDDDLAVVRVKKADLGKDTYSNIKIATIGDSDSVAVGSSAIAIGNALGYGQSVTTGIVSALNRTVTTQDSQTGETVTNNKLIQTDAAINPGNSGGALLNENGEVIGINSVKYSSTEVEGIGYAIPMSVAKPIIESLIQNGKYINENQAYLGIKGGDVSSEMVAYGFPQGVYVSSVSAGSGAANAGLQEGDIITAIDSTKISSMTELQSALKSYKAGDKVTLTVARQSGRQYEESKVEVTLSSAKDVQQMKKKKIVIALGHDALGTTLPEQHEATKHTAKAVADFIRDDYEVVITHSNGPQVGMIHTAMSEFCRIYPEYTATPTAVCSAMSQGYIGYDLQNAIRTELLGRGIYKTVSTILTQVVVDPYDEAFYHPTKIIGRVMTEAEAEEEEKKGNHVTQVEGGYRRVVAAPKPVDIVEKDAIKALVDADQVVIACGGGGIPVLAQDNKLQGASAVIEKDLAAGKLADTLDADRLVILTSVDKVCLNYGKEDEKPLDTMTVDEAKKYLAAGEFDEGTMAPKIEAAIDFIGDSAIRSVLITKLNKEGKTVSGGMGTLITKMSEKRLQKRDEISDEYKWKLEDMYETDELWEAECEKASQLAEKLSGFKGYLADSAATLLDFFKKQDELSYYLERIVVYANERSHQDTAVSKYQAYVSKAETLTVQASGALAFASPEILQIDDKRLESFYSESNELVHYKRAIDEIMRQKEHTLSAAEENILAQCGEMAAAPENIFSMFNNADIKFPYITDVEGNKIRITHGNFIDFLSSKDRSLRKQVFRGVYDSYKKWSNTVSMMYISKLKNDTFYARVRKYDSARAMYLSGGDIPESVYDNLIETVHAHLSALHRYMALRKKLLGVEHLHMYDLFAPIVDNVQTTYTYDEAKKLVAKALEPMGDEYVSTLKAGMESGWIDVYENENKRSGAYSWGAYGTHPYVLLNYADNLDSVFTLAHEMGHAMHTYYSNEHQSITYAGYLIFVAEVASTCNESLLMNYMLEHCEDENERKYLITHFLDGFRTTLFRQAQFAEFEHIAHRKMQKGEPVTKDVLNELWHELNVQYYGPDMRVDDEISYEWMRIPHFYTPYYVYQYSTGYSAAVAFSKKILEEGKPAVDKYIGNFLCGGCSKNPIELLKSAGVDMSTPKPVDDALNVFEDYLKQFEAANKMERIKSFTINHNILKPGFYISRKDGEIVTYDLRTRKPNAGDYMSNSAMHSVEHMFATCVRNSEIADDVVYFGPMGCQTGFYLVVRDVEPGKVFEITKEVLKQILEYDGPVFGASAIECGHYENLSLDEAKKECRAYLKVLESQTNMEFTYPQMTIGVIGAMQMEVDDLKAQMTDTQTEVYSGVEFVEGKIGDQYVVAAKCGIGKVFAAICAEAMILKYDVDMIVNIGVAGTLTKDLNVLDVAVATNVLQHDMDTSPIGDPKGLLSGINMILLPADTKMVELMCSCLADRNIHYKKGNIATGDQFIATKEQKDYISNTFDAIAAEMEGGSIGHVCYVNNVPFAILRSISDGDGGETDYQTFAEKAAHQSIEVVLEFIGRAEELKMQNTKLHNGTKRKKRRHRFLFGVLLSALLITGALYGKEYDISQLKNIEVMETLSSAVSQFGDRKLPVYSVQTTEKKIALSFDCAWGAEDFDSMMETLDKHNVKATFFMTGGFVSDNPECVKTLVEKGHEPGNHSEHHYDMATINAGEMKTEIMDVHKKVKELTGKDMKVFRPPYGSYNNELIDTVYGCDYYPIQWDVDSLDWKNYGVQNIIDTVCNHKSLDCGSIILCHLGAKYTSQALDEMLTKLQDMGYEIVPVSKLIMTEGYHMDANGMQIKDMTDTGFLVAFFIVIFLVIIFALVAVIGAVTSAVAGINDDEDEIEEEGIMISRYSVKKPFTVLVGVLLVIVLGVVSLGRMTTDLLPDMSFQYALIVTTDMGASPQEVESDVTAPLEAAMATTSNIKNVSSMSYNSYSLVTCEYEQNANMDSVVIEMQQKIDQVKAGWKDGVGTPTIMKINPDMLPIMMTAVDMDGKSKAEITDFVENTLKPAIESTEGVASVTATGELTEQIQVTMNQAKIDALNEKINNAVSKKFDDAKSQMDDASAKIESGQNAISSASDQMSAGVDTLKEQKAKLAEQKTQLESTLASLNEQKTQLETIQSALSDFMNSDTYTKTIPSLIEGANVPGEAGTALKAQLEQVDKQIATQFSGLSALGITVNTADDLPAAASAIAQTLIQVNTGIEQCQSGLDQIAQGETALLDAYDNLNSQAAISSISIGQQSAQLATAAASLDSSKKELEKSKDDALDKSNLNAVLTIDSLSQLLVAQNFDMPAGYVNDSNGTQYIVQVGDEIKSIDDLTNLVLMDMKLDGIAPIHVGDVADVEMTDNSDETYAIVNGNPGIMLSMEKQTGYSTGDVTDRLLDKLDSLEKENDGLHTTVLMNQGVYIDMVVKSVMENMIVGAILAIFVLLLFLKDIKPTLVIAASIPLSVIVAVVLMYFTDITLNIISMSGLVLGIGMLVDNSIVVIENIYRLRGEGYSVKKAAVEGANQVAGAIFASTLTTVSVYAPIIFTDGITRQLFVDLALTVAFTLMASLVVALTFVPAIASGMLKKTKDIKHPWFDRFKDWYGNVLGTCLRFKPVVFIAAVVLLVGSGALCMSRGMTFMDMDMESNQISLTIEAKDDEKLDFKQLTELSDKVMDKISDIKGIDTIGATAGGSSTMNLMSSGSDSVSMYILLDEKSDVSSDKVIDEIEKRTKNLDCKVTASSQAMDSSEFFGSGLSVRIKGNDIDKLQKLAGDVADILKDTKGVTDIDDGLGDTINELKITVDKEKAAKYGYTVAQVYQLVSGEISSQKSATTITTDIKDYEVYLQSAEQSDVTVDDIKNLTFTYKDNDGSEKEIPLSDICTISQEQTLSTIHRDAQTRYITVSGAVDENHNVTLLSNKIKSKINKLSIPDGYSIDMEGEDETINESMSQLVLMLVLAVIFIYLIMVAQFQSLLSPFIIMFCIPLAFTGGFIALFITGNELGIISMLGFIMLAGLIVNNGIVLIDYINQARREGMSKHEAIIDAGRTRLRPILMTAMTTILAMFTSAIGIGDGSDMIRPMAIAIIGGLVYGTILTLIVIPCIYDAFNREKSMVEEELMAKYIMALDAGTTSNRCILFNEKGEMCSVAQKEFTQFFPKPGWVEHDAEEIWATQLEVAKEAMANIQATAADICAIGITNQRETTIVWDKNTGEPVYHAIVWQCRRTAEYADSLKEKGLTGTFRKKTGLVIDAYFSATKLKWLLDNVPGARERAERGELLFGTVETWLIWKLTQGQVHVTDYSNASRTMMFNINTLKWDDEILKELDIPKSMLPKPMPSSCVYGEVNPVFFGGPIPIAGAAGDQQAALFGQTCFRAGEAKNTYGTGCFLLMNTGEMPVSSKNGLVTTIAWGIDGKVVYALEGSIFVAGASIQWLRDEMKFIDSSTDSEYMARKVKDTNGCYVVPAFTGLGAPYWDQYARGTIVGLTRGVNKYHVIRATLESMAFQVNDVLEAMKADSGINLTSLKVDGGASANNLLMQMQADISNAPVNRPVCVETTAMGAAYLAGLAVGYWESMDDIKKNWAIDRVFEPEIAADLREKKLKMWKKAVACAFNWAKDEMYDVVIIGAGVSGSACARELSKYNLSICVVEKEEDVCCGTSKANSAIVHSGIDCKTGTLMAQMNIRGNEMMDELSKQLDFEFRRNGSLIVCFSDDDMPRLKELYNQGIANGVPGLEILDSKKAHEMEQNLSDEVVAAIYCPTGGIVCPFGMNIAFAENAAANGVEFLFNTEVKAIQKEQTGYILITQNGEIHARCIVNAAGVYADVFHNMVSENKIHITPRRGEYELLDRAAGGIVDKTIFQLPGKYGKGVLVTPTVHGNILIGPTADDHEDKDGTNTTRAGLEHVVTSGTRSVPSLPMRQVITSFAGNRAHEDGHEFIIEELSDAPYFIDCAGIESPGLSSAPAIGERVAAIVDGLFNPSKNADFIETRKGILNPKKLSEDEYKKLIKEKPEYGNIICRCEMITEGEIMDAVNRPLGAKSLDGVKRRTRAGMGRCQAGFCSPRTMEIIAREKGISQLDVTKSGGKSKIVVGMSKNRGMEFYDIVIVGGGPAGLAAAASAKKNKIDKILILERDCELGGILNQCIHNGFGLHTFKEELTGPEYAGRFIKEVKELGIEYRLNTMVMDISTGDEFKNGADDRHDVKIKDEANDKIVTAMNRTDGLFHIAAKTVILAMGCRERARGALNIPGYRPAGIFSAGTAQRLVNIEGYMPGRKVVILGSGDIGLIMARRMTLEGAKVQVVAELMPYSGGLKRNIVQCLDDFNIPLKLSHTVVDIKGRERVEGITLAQVDEHNKPIEGTEEFYECDTLLLSCGLIPENEISKTAGVELNPVTSGPVVNESLETNVPGVFACGNVLHVHDLVDYVSEEATAAGRHAAEYVKNGGDKSCDGKEISITATGGVRYTVPSIINTAQMDDTVTVRFRVGAVYKNCYIAVYLDDKQLQHRKRPVVAPGEMEQVVLEKKQLIETENPRTITIKIEEAMEERNLTCIGCPLGCALKVTIDGENVTVTGNTCKRGADYGAKEVTHPTRIVTSTVCVKNGTIPMVSVKTAQDIPKEKIMDVMECINQITVEAPVHIGDVLLSDVAATGVDIVATKNVVQKSYMSKELNKTYDPKDIEDRLYKKWEDNGYFHAEVDRSKKPFTIVMPPPNITGQLHMGHALDNTMQDILIRYKRMQGYNALWQPGTDHASIATEVKVIQALKEQGINKADLTREEFLEKCWDWRKEYGGRIVKQLRKLGSSADWQRERFTMDEGCSHAVQEVFTKLYKKGWIYKGSRIVNWCPVCKTSISDAEVEHEEQDGFFWHINYPVVGEEGRFVEIATTRPETLFGDTAVAVNPDDERYQDIIGKTLKLPCTDREIPVIADSYVDKEFGTGCVKITPAHDPNDFEVGKRHSLEEIVVINDDATMNEKAGKYAGMDRYECRKALVEDLKEQGLLVKVVPHSHNVGVHDRCHTTVEPMIKQQWFVKMDEMIKPAVEGVKNGEIKLLPSRMDKTYFNWTDNIRDWCISRQLWWGHRIPAWYCDDCGEMVVSIEKPGKCPKCGKEHWTQDPDTLDTWFSSALWPFSTLGWPEKTEDLDYFYPNDVLVTGYDIIFFWVIRMIFSGYEQMGKAPFHTVLFHGLVRDSQGRKMSKSLGNGIDPLEVIDKYGADALRLTLITGNAPGNDMRFYWERVEASRNFANKVWNASRFIMMNLEGVELREPKLDELHAADKWILSRVNTLAKDATENMDKFELGIAVQKVYDFIWDEFCDWYIEIAKVRTYKKDENPESANAALWTLKTVLVNALKLLHPYMPFITEEIFCTLQSDEETIMLSKWPEYKEEWNFPAEEAAIEHCKDLVKGIRNVRTQMDVPPSRKAKLFITSDDESVRKIFEDNKEVYVNLAFTSEITVQQGKAGIGDDAVSVVIPDAVAYLPLEDLVDFEKEKERLNKEKDKLTKELARSRGMLSNEKFLNNAKPEKVQEEKDKLAKYEQMMAQVEERLAQFKMNVNPITRLDYPDLDVIRVEDTYYMVSTTMHFMPGCEILQSFDLVHWEHATYVYETLDHTDAQQLKSGQNIYGQGMWAASLRYHEGRFYICFVANDTRKTYLYTSEKIDGPWKKQLIEGFYHDGSLLFDEDGRNYIVYGNDEIWITELNEDLTAPKKDGLHRLLVSDHKNPKLGYEGSHIQKINGYYYIFLIHSLRDRWMRTEACFYSDSLEGEFTGGDVLCDDRGYCGQGVAQGGIVDTPDGKWYAMLFQDSGAVGRLPILLPVTWKDHFPVFGQNGHVPEEIEVHSTRPGYIYQPLVGSDDFCNGLLPRWQFNHDPDPQYYHLDALQGTYTITTREVCTELTQAVNTLTQRMSYPSCAAEVTVDASALKEGDVAGLCAFQGCYAAVGITKHHGKYEVLMLDKKEDGILDMTEGTVVESHQMDFRLEADFCNMKDEARCYYRVNKGDWLPIGTVHKLYFKLDHFTGCRFGLFCYAAEETGGSACFRDFKYYDVDEISMINFDEEIKNYEPSLEIEEAESAIYSHDLTDVTDIIAQLLREQDKRQGELRMICYKCGQDAGWNDKCPVCGADLSLFKRAIRISNSYYNDGLQKAQVRNLSGAIISLRQSLKFYKYNIQARNLLGLIYYEMGEMVDALSEWVISANYQPDDNLAKKYIDQIHNNRNQLETINQTIKKYNQALTYCKQDSKDLAVIQLRKVLSLNPKLVKGHQLLALLYLEEGHLDKAKKALRDAGKIDTDNTTTLRYLKEVNRRLKEKGSERKKKNDDLISYQSGNETIIMPKRFRESSMWANILYVIIGLVVGVAVTCFLVVPGIKSQAKTDAKKQLLSANDTISTNGQTISGLNDQIDKLKKELEDEKKKNDGVSDQISTYEALLNAYVYYTSNDVIKAGEALENINTSYLSDSAKQTYNTLNGSIADSYKEALYSQAYSSYSSGDYQSAIPTFQKLVGLDEAYRDGSAAYYLAQSFRKSGDLASAKPYYQYVVDNYAGTEKARTSKNYLAQEQMIENYIKEADRVTYLMPKEVDHHCAGQIIAELDALIEGCGVRKIVFDMKQTEFMDSSGIGVIIGRTKKLKYFNDSSVSVCNMSDRVDKLLKCAGIYTIVHKLMNAAKTNHISLSFDAISENEAFARMTAAMFMAQLNPTLDDVEDVKTAVSEAVTNAIIHGYEMGDDNISSGQADYQAAEEKSCPQVHMNCSYIGRELYIEISDSGVGIQDVAKAMEPLYTSKPQLDRSGMGFSFMEAFMDALTVTSEPGHGTTVKMKKVLMKSDKISRLVTENINLIYLVMKRFRNRGVDQEDLFQIGAVGLTKAAQRFDESKGFAFSTYAVPLIIGEIQRFLRDDGMVHISRKIRDDARKIAIIREKYRMNENSEISLEKMEIISGMSKQDIIIAMEADKNASSIENESVLDYLDNKMSAEASDKPSDTDKVINHIAMQQAFNSLDDSERRLIMLRYMQDKTQKQVAEVLGRNQVAISRMEKNTLAKLRRAMMMKLPLTYDNYIFDLYGTLVDIHTDESDTAIWEKLAMFYGYYGALYEAKELKERYETLVKSSEAELKKKIEKSDADVQFAISYAHEASPEIHIEDVFEKLYEEKSVNPTKELSVHTGQFFRVMSTEYIKLYPGTKEMLKELKKAGKNIYLLSNAQRIFTAYEMRRLDIFDLFDDVFISSDYNTKKPDIRFYKEMINKHDIDVSKSLFIGNDSTTDIKGAKECLMDAFYVRSNISPKDDMAHDADYIIDNFTNWMSNTLLMLCIPFAGLLLCIAVMPLVKPEWWEKHQAHAVILWSLLFAIPFALFYGAPKAVETVLECMIGDYLTFIVLLFGLFCVAGNIKLEGSLVGNPKVNVIMLAVGTLFSSCIGTTGASMLFVRPIIQMNSWRKNKRHIMVFFIFLVSNIGGCLTPIGDPPLLMGFSRGVSFFWSMRLFPVLVINMILLLSIFYHLDKKAYQKDITKGLMPEVRENEPLIRIKGAHNFLYIVMIVIAVILSGVLPKLSAFQNAAGEVIGIPIFREVTLTVPAIIEIAIILLAALLSFKTTPKEVRVQNHFTWGAIQEVAVLFIGIFITMQPALMVLKSAGSGLGITKPFEMFWATGALSSFLDNTPTYLVFLTTAGAMHFTTGVATTLGVVPVKMLMAISCGAVFMGANTYIGNAPNFMVKSLSDENGINMPSFFGYMWWSLRYLIPVFIIDMIIFFLMEFYDEKIKALAIEIYELDAEVYKKLGSSLGRVFGGEKDICIRNIMEDLHSRQNSSRIRSELALISNMARTIPDHDTRHDIMVRYNNIVEEIAELPTGFADGDILDPKIADLNTVNLKDRFKTGDHLIICIGRSCGCGGNEIGFALADKLRMNFYDVSVMNEVFRQKDGEEAAQATATFQKKERMGIKKRIKAFKKYHGLSSEDVLFFDTSKFLVEKAKQEDFIVMGRFADAILTNNHIPHISIFITAPEKRRVQRFLEINKNVTPNQAKKWIESEDKRHLKTYKFYTGRKWSKASNYDICINSASYGIKGSIELIIRMLQLDDRVKQLIEMFEIGDYVLNATNGICKISEIVELDMSGDKKLKSYFLLRPVEEENDRVYIPVDNADKRIRKVITQDEAQAVLDRVPEIEALVVNNEKERETLYKEAVRSCEPDNVVSLLKCLHIRNEQRAQAGKKATSVDERYGKMAEHNLNAELAFVLEKDKQEIKDIIHDMLMNNMNNMNINSAMADTLDIGNTDTEKKTGLIGFYNYTVVLTYIGMWIGFLGVMLAIKDRYVGSLICLMLAGVCDMFDGTIASTKKDRTRDERTFGIQIDSLSDIICFGVLPAVWVFCVTPKISIAFTAIFVFILCGLIRLAYFNVDEANRQAATAERRQYYLGLPITSSALAIPAVYLIGEFTAIHTQTIAALALLIIGICYVLPVKLKKPSLFGEVLLVGIGAVEFCILIAEVLIMAKKSFVDWLYTTAPGRMTLKVLLYTGALKLGEMVARSQLSKPFISRYIKNNNINMSDFKGQKYNSFQDFFSRKRDDIEVDRQAEHLISPCDGYLSAYRIKSNNSFHIKGSWYKVTDLVTDKKIAKEFVGGDCVILRLCANDYHHYCYIDDGFQGRNHFVKGLLHSVQPIALENAPVYRQNRRMWTILDTVNFGKVAQIEIGALLVGGIVNDHENVMMRKGAEMGHFELIGSTIVLLFKKGNIDLLPEIKECIKGDKEVRVIQGQHIANRTAFMLSRDSISQTGQLFNRILPKYSRIPLLFTVVLNFSVYWGARAIAGGFIHHNIETSLDDMIPVVYPTVVIYFGCYIFWIIGYLYNAAMDKRHCYRFLMADWLAKVVCFICYVVYPTTNTRPEIVGSDIWAQLMRFLYSMDAADNLFPSIHCLVSWLCYIGIRGNKKVPQWIRTTFCICAIAVFISTLTTKQHVIYDVVAGVLLIEVTYRISRLLLTKLSKMDDTQIEMLPMLGEFSSIASQYEHIMFYYESGIQQIVAKLQILNNEFKNNHERNPIENIKSRVKSLDSIIDKMKRKGIPLTTNAMKREIKDIAGVRVICPFISDVYQVANMLVNQADVEIVTIKDYIKKPKENGYRSLHMIVLVDVYFSDHKDKVPIEIQFRTIAMNFWASTEHQLRYKKSRVFTEEMQQELKKCADIMADADDKMQNLANVSGIVQPIEMNIQKFTQKSIEAVNDCEKLAYDYGNQEIEQEHLLVALLSQEDGLIPKLIDKMEINVEHFTENAKRHLAARTKVSGSSAQVYVGNDLNKVLIHAEDEAKAMGDEYVSVEHLFLCLLKYPNKAMKELIKEYGLTRDRFLTALSTVRGNQKVTSDNPEATYDTLEKYGYDMVERARQQKLDPVIGRDDEIRNVVRILSRKTKNNPVLIGEPGVGKTAVVEGLAQRIVKGDVPEGLKDKKLFALDMGSLIAGAKYRGEFEERLKAVLEEVKASDGQIILFIDELHTIVGAGKTDGAMDAGQLLKPMLARGELHCVGATTLDEYREYIEKDAAVERRFQPVMVDEPTVEDTISILRGLKDRYEVFHGVKITDSALVTAAVLSNRYITDRFLPDKAIDLVDEACAMIKTELDSMPAELDEQNRKIMQLEIEETALKKETDHLSQDRLAALQKELAELRDDFNAKKAQWQNEKGAVDKVSKLREKIESTKNEIKTAQQNYDLEKAAELQYGVLPNLQKELESEEALLKDRDLSLVRENVGDEEIALIISRWTGIPVAKLTESERNKTLHLDEELHKRVIGQDDGVTKVTEAIIRSKAGIKDPTKPIGSFMFLGPTGVGKTELAKALAASLFDDENNMVRLDMSEYMEKYSVSRLIGAPPGYVGYDEGGQLTEAVRRKPYSVVLFDEVEKAHPDVFNVLLQVLDDGRITDSQGRTVDFKNTIIIMTSNLGSQELLEGIEADGSISTECENRVMDELKGHFRPEFLNRLDEIIMFKPLTKDNIGHIITLLMADLNKRLVDKEITVELTDTAKQFITDNGYDPVYGARPLKRYLQKHVETLAAKLILADGVRAGDTILIDVKDGKLSASAVQKNAMQGEKFTLMQYNVNAILGFIEAGQFVIPEIQRPFVWKRAQVRDLIDSLYNGYPTGYIITWKNPDVKTKDGTVANGKHVLIDGQQRITALMASIAGLEVLDEDFNRDRVKIAFNPLATDSDKRFAVQDASHLKDKKWIPDISEVFKNDFDPFEFVPKYCNNNLGVKPNEVNNAIMKLRGIANRQIGVIELDHSLDIDEVTEIFIRINSKGTALSQSDFVMSKMAADTVHGGNILRKVVDYFCHLAVKPDFYPQMIKDLEFEKTEFASKIKWLAKDNEDIYNPDYNDMLRVAFMYSFNRAKLSDLVSLLSGRDFETREFKEEIVEDSYNKLCEGIKVFINEHNFEQFVLAIKGAGFKSSKQLNSQMTLDFAYMLYLKLSKDSSIPHDQVKHHVQKWFVLSTLTGRYVGSPESVMSRDIRLINEKGFINFFYEIEASVLSDTFWDISLPQNLETTSTNSPAFNTFLAAQINLNCNSLFMHGTMISDLINISGDVHHIFPKAYLKNNGIDTKGRYNQVANFTYLDTQVNKAISDDAPNIYFQSALEQCDKKNIAFGNIFERDALMKNLSENAIPESIVSMTVENYDDFLADRRKLMAQLMMRYYNGLMRFYGYKATNWGTTDYDKKIALERKNNQVFIGGLWLINLMELAKVTSKGQITIPIEIRKKLGIKNGDKILFVEESGRVYMMNSSMDALREAQRSFAGEAERLGLKDDDDVMEMIKSLRQESVVKMLDTNVLISALLFPGTKMDAMMNYIFTNHQLVLSSYVVDELKNVVRRKFPGKEMIINKLLMMMSFEYVYTPGSMESGLFNIRDIKDYPVLYTAIIEDVDILVTGDKDFSDIDVEKPKIMSPTQFMENFLEEWMSITAKELAKQLNLSEAAISMALNNKPGVSTLTRKRVLEAATSAGYDFSRISNTNEAPTSNGTLYFVIYRKNGAVVPNSPVYTHTEHGVLVQDVPFFSQLSEGIDLGCRHCHYYLNISYIYENDDIEALLSEWKRLGAKGILLLGTEMEKHDIKPFTRCGLPVVLIDNYFEALNLDCVTINNLQGAYLATDYLIKQTHAQPGYLHSSYIITGFEERADGFYKAIRKNGMSTSRSVVHHLSPTVDGAYCDMKAVIKSGDELARCYFADNDLIAAGAMRALSEAGYRIPEDISVIGFDDMPMCTYITPPLSTVHVPKQYMGEIAVKRLAEIINSISASHVKIEISTEIVKRKSCMNNIPKMKIGIVAVSRDCFPESLSVNRRKALVDAYAAKYDAADIYECPVCIVESEIHMVQALEDIKAAGCNALCVYLGNFGPEISETLLAKHFDGPKMFVAAAEETQENLIQGRGDAYCGMLNASYNLALRNIGAYIPEYPVGDADDCADMIHEFLPIARAIYGLNNLKIISFGPRPLNFLACNAPIKQLYNVGVEIEENSELDLFEAFNKHAGDERIPDVVKDMERELGEGNKKPEILEKLAQYELTLLDWVDEHKGYRKYVAIAGKCWPAFQTQFGFVPCYVNSRLTGRGIPVSCEVDIYGVLSEFIGTCVSEDAVTLLDINNSVPKDMYKESIEGRFDYKHTDTFMGFHCGNTCSSKVCNPQMKYQMIMARSLPIEVTNGTLEGDIVPGDITFYRLQSTADCKIRAYVAQGEVLPVATRSFGSIGVFAIKEMGRFYRHVLIEKNYPHHGAVAFGHYGKALFEVFKYIGVPVEDINYNQPASLPYKTENPFCMLYIGVDLGTSAVKLLLMDESGRVLNIVSKEYPISFPKPGWSEQNPCDWWEQTVAGLIELTKDFDRSAVAGISFGGQMHGLVVLDENDNVIRPAILWNDGRTQKETDYLNNVIGKEKLSELTGNIAFAGFTAPKILWLKANEPENFARIKKLMLPKDYIAYRMTGVFSTDYSDASGMLLLDVKNKCWSKEMLDICDVREEWLPGLYESSEKTGTLKADVACELGFPKDCIVAAGAGDNAAAAIGTGTVGAGKCNLSLGTSGTLFITSDEFRVDSHNALHSFDHADGGYHLMGCMLSAASCNNWWMKDILHSDDFVNEQKPLEEDGRLGENHVYFLPYLMGERSPHNDPSARAAFIGMSMDTDRADMLQAVFEGVAYGLRDSLEVAKSLGVAPKSTTICGGGAKSVLWRKIVANVMNMQVDTVEVEEGPAYGGAILAAVANGCFENVEAAAAAIVRKKDTTMPSPQLVEKYEKGYAKFKQFYPALKGKYMDLFDYMREQNKETSGPLASRMRPTTLDEVVGQQHIVGKDKLLYRAIKADKLSSIIFYGPPGTGKTTLAKVIAHTTSAEFMQINATSAGKKDMEEVVEQAKNNQGMYQKKTILFIDEIHRFNKGQQDYLLPFVEDGTIILIGATTENPYFEVNGALLSRSVIFELKKLSTDDIKVLLKRALTDTEKGMGAYNAQIDDDALDFLADVSNGDARAALTAIELGVLTTDRSDDGIIHITIDVASECIQKRVISYDKKGDNHYDTISAFIKSMRGSDPDAAVYYLARMLYAGEDVKFIARRIMILASEDIGNADPMAMVVAASAAAEVERVGMPEAQIILSQAVTYMACAPKSNASYNAISAAMSCVKQTKTPAVPAHLQDAHYGAAEKLGHGVGYKYAHDYPNHYVKQQYLPDGLTDRVFYKPTDIGYEAKIKAHMDELHRDCDTMKKYTEMTKDELMQEKTALEAEYEKIKNLGLSLDMSRGKPGAEQLDLSLPMLDVLKSDSDMKSESGLDVRNYACLDGIPEAKALIAGMVGAKPEQAIVYGNSSLNIMYDQVARAFIFGLCGNTPWCKFDKVKFLCPVPGYDRHFAITEEFGVEMINIPMTEDGPDMDMVEKYVNNDASVKGIWCVPKYSNPQGVVYSDETVERFAKLKPAADDFRIFWDNAYTVHHLYDDKQAEIPNILELCEKEGNPDMVFEFCSTSKVTFPGAGVAGICTSEKNREDIKKRLTIQTIGHDKINQLRHARFFKDVDGIKAHMAKHAALIRPKFELVENILTDEIASRGIGTWVKPLGGYFFGFEALSGCAKEIVAKCKEAGVTMTGAGSPFPYKKDPDDSVIRIAPTYPSLDELKKAAEVFVVVTRLVSVNKLLEAMKEIFQEYGGILITVVAILSIILVVTAVIGSDATGIVGKTFSDLITNFSNHANMSVKMELGKEYFGPLWSFVASNEITDIDYNGKEIWLTNIFNERFRANQQFVTQYMTPAFVEQFTQRIANVVSRQFNKRNPELEAETSELRVTILHESVAKSGRSISIRKTPPLIRLTAESAIAEKFCSEELLAVLINCVKTKMNITFCGMPGIGKTECVKFFSQFIPANERVITIEDTLEIRYAETNPGKDCIEMKVSEDVFGYSEAIKSCLRMNPKWIMLSEARSKEVKYLLQSWSTGVRGMTTLHTDDVRNIPDRILNMLESRVDAERMENDIYQALDVGILIRKRRNEDGVVYRYIDQVCFFYRENYTNHVFMLVSDGQIVTHDIPNVILRRFKREGVNEPFGESFVNEIRMNEAMMSEEREAMTYILILFLTYVLHLLLKLNWVCTAVVLVFLLVMQHFHRIKGQRFQEARKRFLDVSLYIDTLLYSFLKEHKIIRAFEDVKSTLADGHMKETVSRAIDHMMLTFDETEVFVDAMRIIEDEYKCNRIVNAHEFMAHAEYYGGDIKESARILLKDKSAWERRILRNIEDRQRMFHQIILSVVTSVIISGIILYLPVLSMDISSNIIVQILSVALIVLDDLIILWGQKFLEVDYLGIDLLPEDDKHAKKLEEYKAYNPAKELRTSILMAVIPALASAFLLYTDRQWAAVAAMGAALICLNQHRIGHRLMKKNLIADVKSAFPKWLMDLALLIQSENVQVAIQKSREHIPVILKEEVNTLVERLDVEPESSDPYHRFLDCLNLPEINAAMGMLYAVSIGNSGNCGSQIDELITKNLEMLDVADTARLKDKTAGMYLLFLAPVITASFKMIVDMAIFLISFLSYKVVMKTFLGVFLIMFMVVTSSGVLSGFMTVVEAQNLHAQIINELEDSDYDSLVAQTCFENASKAGDTLELKLYMTDNSIRTVTDASQIASSDEIEKARVELKFTYAVAFFGIEQEHVLSGYALMELLIEELGGSVIMLLLGSGVIGVLVYVSTLLMKEVFRQYGGVLIAAAATSAFLVLMGNIVLAQGGMLAQLINIWGNSAIMKEIMQTYGAMIVAVVVGIALLSGFGALKNKMSVAFAPQDILSSDSANDSYDSMKNIPVPGIELKEKMRQNAVSYSVYDLLDVTAHEDNLDKLEVYALYDSGRNYCTGSISADGSSISFPDYGVYDMHVRITCQNGTRDHVRISIPINRKVADIMKNEKQHRLLFIIPAVIIAIILIICIAVAVSSKSGEKGKKKDSRSVSVTENTQDIVAESETLELVKKDALKETNVVDKDNKQNNGTQSDTNDNSAPAAGNSDNANTASDKSSDKSSEDKTAADKKTSTGSNNTQQPAGNDSKPAASNQTVAPEPAQSEPAQPEAPKNEYVAPGWIFYGSKAGNGMTGEQKAYIDSVIQQWTNGGLSDDAIGDMFIEKIAQEWQLPMITAGVTSNLLCLFPSRAEVPDYSLNLADMNGAYNFVGLYTNGEYDENGYLKCYYWEAGVLMMFVATVIITYMFSFDCNIVKADEWDDAVKYYSNYGNAAVFKATDRTNGNIYFCSAGNTSTSGTKYRTIGYKMTIKGIAGNEIQKIYFQLGGQYLTLLNSKKQSGKEYMLYVITLKNMKNRFNTQALNALSSGSCTIILDACMVLRVNGKNKGGMNDNGPSWGKVYTTYAGISKAANWTDSALSALYSYYGKTVRGLFHTIDVRKSTGISSVSGGGTYCYGTYVTISASSSAGYDFTNWNNDSSMSSSSYGFYVNSGGTYTAYAKAGTIAVTFWRNTSASDSEKTSKSYTYGDINQAFPAVGWQMAGYHMNGWGNNSYDTTAGYPLLCGVANSWIESNRPSKNIYAVWQENKYTIEYDTGVSATVKYSDTVTLPSQHMCIGWLLGEEYPDIKYAPGESIQVADLCRILGIEYTDKAVIRMYALWEHEPTIEADDMFFSIKQARNGGITEQLIGSLISATDVEDGDIAFGDNEINYLKVKNFDDRKIESARDKDIIEIVLEAKDSYGNITQKTISITFTDTQVKERTKAFGKIRFISEKYYGKNKAGGLMENSRWLNDPEFNSLLRQALAIMKNVVLGIIGCLIVVYTAMLGLSVYNMTVRENQMEKSLSLALSGAMNRYYEPNMYIVDKKPVSSYDVEKALIEDINERLTAGGTAIATVYVCDMEKGIISAGIEEEFKLPTGVTKKISCKKTIVADQPMEDNMRTLAEAGNTKAKKVLKVTENSPKMLSAILIGNNIVNLSASSLTTSLAIKLFGSVGAGVATGILTFLILIFGEVSPKTLATIKADKISLSIAGFISVLMVVLTPVIFIINKLSLGVIFLFGIRQSDAKRVMTEEELRTIVDVGQEDGIIEDEERDMIHNVFDFGDAEAKEVMVPRIDMTFVHVDSTYDDLISIFREDKFTRLPVYDESTDNVIGIVNMKDLLLLKDEDKEHFSIRNIMREPYFTYEHKNTANLFLEMRESSISLAIVLDEYGVTAGLITLEDLLEEIVGEIRDEYDSDEQDDITRINDYEYIVLGSANLEDVSDELGLHLESDDYDTIGGYCLEKLDHLPEKNEIIITDDNILLRIEAVDKNRIEKVYIKLPKPAEEENMAFVLPASARVLIRILFTVVRAVSEDEKNAESANSINKNIICDMSSASKYFTSMGTIIGEGITFDDVLLVPQYSEVTPNMIELQTHLTKKIVLNIPMMSAAMDTVTESKMAIAMARQGGIGIIHKNMSIEAQADEVDKVKRSENGVITDPFYLSPDHTLQDADNLMAKFKISGVPITKDGKLVGIITNRDLKFETDFTKKISESMTSENLITAPEGITLDEAKKILAKARKEKLPIVDKDYNLKGLITIKDIEKQIKYPLSAKDDQGRLLCGAGVGITGNMMERVDALVKSHVDVIVVDSAHGHSKNILEAVKKIKAAYPDLQIIAGNIATGAAAKALIEAGADAVKVGIGPGSICTTRVVAGIGVPQITAIMDCYKVAKEYGVPVIADGGIKYSGDMTKALAAGANVCMMGSMFAGCDEAPGTFELYQGRKYKVYRGMGSIAAMENGSKDRYFQEGAKKLVPEGVEGRVAYKGTLEDTVFQLVGGIRSGMGYCGCKTIEDLKENGQFVKITAASLKESHPHDIHITKEAPNYSTDDKMEFRPCIDIHNGKVKQIVGGSLKDRGDFASENFVSEQDSRFYADMYRKSGIKGGHIILLNSVDSEYYEDTKKQAVMALEAYPQGLQVGGGITADNAMEFIDAGAAAVIVTSYVFKDGRINYANLNRLKDTVGSDRLVLDLSCRKKDGQYYIVTDRWQNFTDEAVTTELLDKLSSYCCEFLVHAVDVEGRVNGIEKELVAMLGSWGRIPVTYAGGVSSFDDLKCIRQLGQNHLNVTIGSALDLFGGEMEYDKVIAFCNNKEIMAKYSKNDIIRIVDEEDIEFIRLQFTDIFGTLKNVAITASQLEKALDNKCMFDGSSIEGFVRIEESDMYLHPDLDTFMIFPWRPQQGKVARIICDVYMADGTPFEGDPRYILKKQIEKAKQMGYIFNVGPECEFFLFHLDENGQPTTISHERAGYFDLGPNDLGENARRDMVLTLEDMDFEIEASHHEVAPAQHEIDFKYEEALHTADNIMTFKLAIKTIAKRHGLFASFMPKPKHGVSGSGMHINMSLSKDGVNIFDNEEDKLGLSEEAYYFIGGIMKHMKGMTVITNPIVNSYKRFVPGYEAPIYITWSATNRSPLIRIPAARGEGRRVELRNPDPSANPYLVLALCLAAGIDGIKNKIQPDAELRENVFELTEHDKKRLGIESLPADLHEAVECLKSDDFIREILGEHIYDKYIEAKEAEWNDYRAAVTQWEIDEYLYKFMNNIVIAFPKKEVANSIKKILAQSGYTVTAVANTGASALSSMNGLNMGIIICGYRFSDMMYSEIYEYMPREFQMLLIASAAGIMEKNVDNLMSLSMPLKVHELLQTVEMMDYTITRRRKKLRQRPKVRSKEDQEMLSSAKAVLMERNGFSEEEAHRYIQKRSMDNGTGLVETAQMILSLMTDVMFQINDNFQKLPGSYLFSTIAKKVAAYQEANPDKEIIRLGIGDVTQPLAPAIIDALHKAVDEMGNAATFHGYAPDLGYEFLRKAISDNDYKARGCDISADEIFVSDGAKSDSANIQELFSANSRIAVTDPVYPVYVDSNVMAGRTGTYDAQKETWSNVIYMPSTADNGFVPELPKEVPDMIYLCLPNNPTGTTLKKEQLQVWVDYANKNGSVIIFDAAYEAYISEADVPHSIYECNGAKTCAIELRSFSKNAGFTGVRLGFTVVPKELKCGDVSLHAMWARRHGTKFNGAPYIVQRAGEAVYSDAGKAQLKDQVAYYMNNAKTIKTGLAEAGFTVYGGVNAPYIWLKTPDHMTSWEFFDYLLENANVVGTPGSGFGPSGEGYFRLTAFGNYENTVKALERIKALMKTTRDDIRNIAIIAHVDHGKTTLVDELLKQSGVFRDNQEVQDRVMDSNDIERERGITILSKNTAIQYKDIKINIIDTPGHADFGGEVERVLKMVNGVILVVDAFEGVMPQTKFVVMKALALKLPIIVCVNKIDRPEARPNEVIDEVLELFMDLDASEEQLDCPFVFASARDGYAMKDLNDERKDMTPLFETIVNYIPAPTGDPDANTQILISTIDYNEYVGRIGIGKVDNGKIKVNQEAVVVNHHDPDKLEKVRISKLYEFDGLNKVDVAEANIGSIVAISGIADIHIGDTICSPEAPEAIPFQKISEPTISMNFIVNNSPLAGQEGKFVTSRHIRDRLFRELNTDVSLRVEDTDSPDSFKVSGRGELHLSVLIENMRREGYEFAVSKAEVLYKYDENGKKLEPMELAYIDVPDEFTGAVISKLQQRKGELRNMGSIAGGYTRLEFHIPARGLIGYRGEFMTDTKGNGILNTMFDGYEPYKGEIAYRATGSLIAFESGEAVTYGLFSAQERGTLFIGPGAKVYSGMVIGQCSKAEDIELNVCKKKHLTNTRSSSADEALTLVPPKVLSLEQAIDFIDTDELLEVTPESLRIRKKILDPTLRKRAGFKKNMADKMFENNQVSIIGEIVSDFQFSHEVYGEGFYMMEVSVRRLSDCMDYIPVMVSERLINVEGDYIGKSVYIGGQFRSFNRHEEKKNRLVLSVFARELEVLDSDYDEDAANQIFLDGYICKEAIYRKTPLGREIADLLVAVNRSYGKSDYIPCICWGRNARFASTFEVGTHVQIWGRIQSRDYVKKLSETQVEQRTAYEVSVSKIEAMENGAVQIYYGEGHGKTNVAIGSAICAACEGKQAVVIQFLKGKKEPEFLKKLEPEVKFFNFSRAGILFEQLDEESKQEEIMNIKNGFNYAKKVISTGADMVVVLDEILGLLDLHLISKEELSDMLASRPDDVTVIMTGRVLDDGIRKMADEIYNIASEKMPQGQLMGDERNSAEGIYHLRIYLWAYGEQPYDCHQIMAIFKGAGVAIVTPMYDNEEVNYDKLEELINMQIDNGTDAIIIAGTTGESPCLSMEEHAKVIKAAVEFTKHRVPVVAGTGSNCTKTAMQLSKEAEEFGADGLLVVTPYYNKATQAGLVSHYLQIADSTKCPIIVYNVPGRTGCNVLPETMAELFKTKENIVGLKEATGNLAQASKTMYLTDGKLDMYSGEDGLVVPLMSIGAIGVISVWSNVAPAKVHNMCDSFFKGDLQTALELQREALPLVDALFSEVNPIPVKKAMNLMGMNVGPLRSPMCEMGEDNARKLAEVMKAYGLKLAMTKVIMNGCNGKMGQTITEICKADADIKIVAGIDLYDGIDNDYPVFSSIDKCDVDADVVIDFSNAKAVDGVLDYCVDKQVPVVLCTTGLSDEQLAKVEECYKKVAVLKSANMSLGINTLMALLKKAAQVFAPAGFDMEIVEKHHNLKLDAPSGTALALADSINEAMDNEYHYVYDRSQRREKRDPKEIGISAVRGGSIVGEHEVLFCGQDEVIEFKHTAYSKAVFAKGAVEAAKFLKGKGAGHYDMADVIAAKMNNFIEKLKSRSPLIHNITNMVTINDVANIELACGARPIMAMAPQEMDEVTGICDGLNLNIGTPSEERFEAMRIAARMAAKKNIPIVLDLVGVGVSRFRMDFVMSLLDEVHVDVIKGNLSEVKAVMEHGRCDGGVEVTDTADESDAKALACRAALRYGCICVITGETDYVAELCDEADCYDNNESSQMSTDATGTGVMDTGVVNAVASDADGYTHNYRVGSITGGHPMMKRVTGTGCMLSGLICAFVAADCDDKYGAVTAALSCMKSAGGLAASDMSEHGRETNSCYFIKPGNAAYRDRLIDAVYHICDGDYELMMNKTDLKLYAITDRQWLHKARLSEHVKLAIEGGATMIQIRDKDILSTDSDAGLKDEYNEALEIKRICHEHKVPLIINDNVQFAIDIDADGVHLGQDDMNPAEARKLLGADKIIGVTAKTVEQAKRAEADGADYLGSGAVFGSTTKLNAKPMTKELLREITAAVDIPVVAIGGINADNAVTLKGTGIAGIAVVGAIFASADIKGAARELAEICDKILMHTALTIAGSDSSGGAGVQADLKTMLANGVFGESVITALTAQNTMGVDAVMNVPADFIEAQMKAVFTDIFPDAVKIGMTSSVDTIEAIAAGLVKYNAKNIVLDPVMVATSGSRLLEENAANTLMDKLFPLADIITPNIPELEVISGRQIESTDDIIEASKAIYDKYGCPVLSKGGHFTDTACVCDYLWDGRQIITFETKRVDNPNSHGTGCTLSSAIASGLAKGQPLEQAVDNGKRYVTACLKAMLDLGHGSGPMNHGALILQMSNYTTQMDAARKGIVTPEIEKVAKKEKMDVDKLMELVASGKVAIPANKHHKSLDAEGVGSMLRTKINVNLGVSRDCKDYDVEMQKVMSAVKLGAEAIMDLSSHGNTQPFRQKLTSECPAMIGTVPVYDSVIHYQRDLATLTAQDFVDVVRLHAEDGVDFVTLHCGITRKTIDQIKKHKRKMNIVSRGGSLVFAWMCMTGEENPFYEHYDEILEICEEHDVTISLGDACRPGCLADATDVCQIEELVRLGELTKRAWDHNVQVMVEGPGHVPLDQVAANMKVQQSICMGAPFYVLGPLVTDIAPGYDHITAAIGGAVAAMNGAAFLCYVTPAEHLALPNVEDTKQGIIASKIAAHAADIAKGIPGARDIDDKMADARRVLDWDAQFACALDPETAKAIRDDRLPEDDHSEACSMCGKFCAVRSMNKALAGEYIDILMESKKNIKKSTISIRKLAMAGVLVAVAVAGSLISFPVAGSKCAPIQHMVNICAAVFLGPVWGVGVAFCASVIRNLTGLGSLMAFPGSMVGALCCGLMYRFSKKIIPTCVAEALGTGILGGLAAYPLAKYVMLIQPEGMFIYIVPFLISTVAGSIVAAIVMLILKKNGALAAFKGNLMTEHIRQTQESQKHIAASEYEADSKVTGAHRINRPLPYGIWRRMKIGIIGAGRVGCSIGKYLRTKDIELAGYYDVDSAAAKEAAEFTRTESFDSLKQLADQSQIIFITTPDSFIIPVWEQLKELSLRNQIICHCSGALSSDSFSGRESMSVSCCSIHPMLPFSNRFSSYEQLNKAFFTVEGQDAAVEAISGLFCSIGNEVCRIDGAKKAKYHAAASILSNQVIAVLDMGYTLLEDCGFTRAEAVRATGQLVMRNIENVLEAGCDGALTGPIERNDIETVKKHIACMQNDDSDDVSLYKMLGTKLANIAEKKNPDKDYTQMMELLRGMKNTVITFKQAKEKGEKLTMLTAYDYSTAKLIDEAGINAILVGDSLGMVVLGYEDTLSVTMEDMIHHSAAVSRGIKDTLLITDMPFMSYQTSVYDAVVNAGRLVKEGHAQAVKLEGGREVCPQIKAIVDASIPVCAHLGLTPQSVNAFGGFKVQGKGEEAAQKLLDEARAVEEAGAFAVVLECVPKALAKKITESISIPTIGIGAGADCDGQVLVYQDMLAMYANMKPKFVKQFAQVGKEMNEAFTAYKKAVEEGSFPGEEHTFKMDETIIDKLYMLIYGQIKQVREAVKEWKREGKSVGFVPTMGYLHEGHKSLIDAARRENDKVVVSIFVNPMQFGPTEDLDSYPRDLNRDAKLCEDAGVDIIFHPEADEMYADGFCSYVDMNGLTTELCGKTRPIHFRGVQTVVLKLFHIVTPDRAYFGQKDAQQLAVIKRMVKDLNVDTEIIGCPIIREEDGLAKSSRNTYLSADERQAALVLSRSLKIGKQLVDAGEKSAKAVKDAITAEINKEPLAKIDYVDVVDFDTITPVDEIKGTTLVAIAVYIGKTRLIDNFIAMNYTMLKGKIHRAVVKQADLNYVGSITVDTKLLEAAGILEYEMVQIVDVENGNRFETYTIAGEPGSGMICLNGAAARQVAVGDHVILMCYAQMTPEEAKEHHPKVVFVDDENKIARVTNYEKHGKLTEDFIMYTADEKRYDTMRYNRCGRSGLKLPVVSLGLWHNFGDFSSYDNMKQMCFTAFDHGITHFDLANNYGPEYGSAEKHFGLILKEHLSAYRDELIISSKAGYDMWKGPYGNWGSRKYLIASLDQSLKRMGLDYVDIFYHHRMDPETPLEETMGALDQIVRSGKALYVGLSNYDGETMKRACEILTDLKCPFIINQNSYNIFNRTIEQNGLKQAAKECQKGIISFSPLAQGMLTDRYLNGIPEDSRIKTDGRFLNQEKLAPHIEQIKKLNDIATKRGETLAQMALKWVVKDDDVTSVLVGASKPQQILENLKVMEGAGFSEEELRMIDEVVGVMINKLVDKIKKTNAPIVVGLDPMLSYVPEHITKKAFDELGETPAGAAEAIWQYNKAIVDATYDLIPAVKPQIAMYEQFGVEGLKAFQKTVDYCHEKDLVVIGDVKRGDIGSTSAAYATGHLGKVQIGSKSYSTFDEDFATVNPYLGTDGIKPFVDVCKEEKKGIFILVKTSNPSSGEFQDRMIDGRPLYEWVGEKVAEWGADCMGDSYSYVGAVVGATYPEQGKILRKVMPKSFILVPGYGAQGGKGADLVHFFNEDGLGAIVNSSRGIICAYKQDKYKDMGITAENFADASRKAVEDMIEDISGALANRMAEKFEEIAVVVDQSSLGNGIYDLTLKTDKIAKAAKAGQFVSVYSNDKSKLLPRPISLCGINRDDDTIRLVYRVTGEGTGTEEFSKLVRGDKVRILGPLGNGFTVQPGKKAFLIGGGIGVPPMLQLAKDINAGIVQTSGEEKNSGQAAMEGAEIKTAVCDMNIVMGYRDENTFLLDEFKEQAASFVATEDGSVGTKGNVIDAIKENALEADVIYACGPMPMLRALKAYAAEHDMDCFISMEERMACGIGACLACVCKTKDKDAHSNVNNKRICKEGPVFDAKEVELMSNMSVNVAGVEWKNPVTVASGTFGSGAEYSEFVDLNRLGAVTTKGVANKPWEGNPTPRVAEVYGGMLNAVGLQNPGIELFCKRDIPFLKQFDTRIVVNVCGHSLDEYLDVVKRLADEPIDMMEINISCPNVKEGGIAFGTDPKGVETITSEIKKYAKQPVIMKLSPNVTSIAEIARAAEAGGADAVSLINTITGMKIDINRRNFVLANKTGGMSGPAVHPVAVRMVYETAHAVNIPIIGMGGITNAADAIEMILAGATAVSVGTANFVNPKTTEQIVDGIAEYMDRYGVKDISELVGAVDRMILAAEYVPSMYATVWALVPPVVAIVLALITKEVYSSLFVGIVIGGLFYGNAFQPGFSAERSVLHIFEDGLVGVLSDSYNVGILIFLVVLGVMVSMMNKAGGSAAFGEWASEHIKTRIGAQLSAIILGVLIFIDDYFNCLTVGSVMRPVTDKHQVSRAKLAYLIDATAAPVCIIAPISSWAAAVTGFVKGEDGFSIFIKAIPYNYYALFTIIAMVTLVVLQVDFGPMAKHEANAKKGDLFTTGDRPYAEAKQDVIKGKGKVIDLVFPILVLIISCIIGMIYTGGFFDGTGFVDAFAGSDASIGLMLGSFFALIITICFYSIRRVLSFTDCCNSIPEGFKAMVPAILILTFAWTLKTMTESLGAKEFVAGLVGGVSGPLLGLFPAIIFLVGAFLAFATGTSWGTFGILIPIVVNIFSGTNHTMMIISISACMAGAVCGDHCSPISDTTIMASAGAQCNHMNHVSTQLPYAVLVAGISCLTYIIAGFVRNPVVPFIIGMLILIGTFVGIKYIIKYITRTDKANEQAEMAKIAKQLTELIGHTPLLELTNYEKALGLEAKIIAKLEYFNPLGSVKDRVAAAMIEQGIKDGKINQDTIIIEPTSGNTGIGLAFVAASKGLHLILIMPDTMSVERRKIVTALGAEIKLTPGREGMKGAIDEAQRLKEHYGNAFIPQQFENQANPDIHRATTAQEIWEDTDGKVDIFVSSVGTGGTCTGTGLGLRDHNPDVRIVAVEPKSSPVLSGGRPGPHKIQGIGAGFIPKVMRMDIVDEVIPVENEAAFDKAREVAKSDGLLVGISSGAAIYAATELAKRPENKGKNIVVLLPDTGERYLSTPLFTVNMRNIHKYTAALLSTVMILSLLLTGCSGRKDDGTVTITNVSYDPTREFYEKYNKIFESYYESEHGKKINVIQSHGGSGAQARSVVEGCNADVVTLALEHDIDLIQNTGLIDKGWIDEFSDSSAPYTSTIVLLVRKGNPKHISDWDDLVRKNVDVITPDPKSSGGACWNFLAALSYAKTNYDSLKEQKSFMKKLYENVTIMDSGARGSTTTFVENGQGDVLIAWENEALTTMDSYPGKYEIVNPSVSILAQPSVAIVDDNAKSNGTQEVSKEYLQYLYSDEAQQLIGESGYRPTNQDILNRFSDKFDLNIRLWSIEDYGGWNEAYKTYFDDGAMFDEIYGNMKYTATDKTAKEKTKSKNIKTRVIPGYHLSLGIVVTMLSVIVLIPLASVLVYSLKISPGDFVALIMKENVRNAFITSITSSFIAAIVNVVFGLIVAWTLVKYDFPGKWLLDGLIELPFALPTAVAGITLSKLYSGTGFLGKGLGKLGIDVAYTQAGIVVALVFVGIPFVIRAVQPVLEKMDNTYEEAAYMLGATPSKTFFKVILPELRPALLTGFGLAFARGIGEYGSVIYISGNSARHRTQVVSYVIMQKLSYIDYASATAIALVMLVISFLLLLFVNIVQVKQSQRTNLLMTEQVKLERRKKITKIILVTVTVLFIFVMLIVPLFSVMASALKEGLGFYLKAISTSYVLSALKVTLIATVFAVVINTFFGIWTAWLLTRFSFKGKQVLATLIDIPFSISPVIVGLAYLMTFGRLGWFYPVIRWFNEIFGTNVRITFAIPGVVLATIFVTFPYVSREIIPVLNAEGKDEEEAAALMGASGFTIFRKITLPQMKWSLIYGIILCTARALGEFGAVNALSKTRGETFTLPLEIDALYMSGTDSSITSAFAVSSILLIIALIILFARNIVEHKFKKLHMYVEMKNIYKKYGDFLASDNVSFGVEKGKLVALLGPSGSGKTTLLRMIAGLETPNSGDIYIDGKRVNDIPASKRGIGFVFQNYALFRYMTIYDNVAFGLELQKMPKKLIKERVTKLLEMTGLSGLEKRYPNQLSGGQRQRVAFARALAPNPQVLLLDEPFAAIDAKVRGELRTWLKELVEKLGITSIFVTHDQDEAVEVADEIIITNHGTIEQMGTPLEIYKSPDTPFVAQFIGHTTVVENYDRLKGFDRIENADKAVIRPEFIKISKSGNLDRYQSAAEEGIVTDVVFRGNRMDITVSINGIEVVGERSLEKDLIAVGEKVHVLIYRLYIFDEEKTYLMENSEMQEQDVFYIMKIENKKILHTDILIIGGGTAGCYAALTIREKSDYSIIIAEKANIKRSGCLAAGVNAINAYIVKGRKPEDYVDYAKKDADGIVREDLLMTMSEGLNRVTDKMEKLGLVILKDENGEYVARGNRNIKINGENMKPLLAEAVSKLTDCTVINRINITDYIVEDNTIKGAYGFSIEDATAYEIRAKKVLCATGGAAGLYRPNNPGFSRHKMWYPPFNTGAGYAMGIRSGAEMTTFEMRFIALRCKDTIAPTGTIAQGVGAKQVNSLGEVYETKYGLTTSERVYGTVMENLEGRGPCYLRTEGISPQQDESLRKAYLNMAPSQTLKWVEAGKNPSEQNVEIEGTEPYIVGGHTASGYWVNTERETTIHGLYAAGDVAGGCPQKYVTGAMVEGEIAAIDMVSKLDADTSDGSPYTSAFDEKKALDAKASEYDHFLTERSQMFTTEAIEEAMQKVMDNYAGGISTHYQFNGKQLALAKEKINHLIELTGDLYASDMHELMFIYELKERLTVCLSVIAHLGARKETRWHSFAENLDYPGKSDDWMKYVNSKYENGQLHMIYRELVGREARYEHNDMSIMIDKAKCKGCGMCTSVCPGSLIYQDSEKKAFIKYPKDCWGCASCIKECHFGAIALYLGADIGGMGSLMTVKSTPDTLTWDIKKRDGSKEEILINKKESNKYMGELSHLDELEAEAIYIIREVAAECEKPVMLYSIGKDSSVMLHLAMKAFYPEKPPFPFLHVNTTWKFHEMIEFRDRIAKEKGIEMLEYINQDGVKQGINPFDHGSAYTDIMKTHALKQALDKYGFTAAFGGGRRDEEKSRAKERIFSFRNENHAWDPKNQRPEMWKLYNSRIKKGQEVRVFPLSNWTEKDIWQYIKRENIEIPSLYFAKERPVVYRDGNIIMVDDDRMKLRPGEKIQMKSVRFRTLGCYPLTGGVESTADTLDEIIDETLSAVSSERTTRVIDNEAAGSMERRKREGYFMSGLLKFITCGSVDDGKSTLIGHILYDSKLLYADQEKALELDSKVGSRGGAIDYSLLLDGLMAEREQGITIDVAYRYFTTDKRSFIVADTPGHEEYTRNMAVGASFADLAVILIDAKQGVLVQTRRHARICALMGINYFVFAVNKMDLVGYDEKRFDEITKQIIELTKELELKNVVIIPVSATEGDNVTTKSENIPWYKGPALLSYLEDVDIKDENEEEGFYMPVQRVCRPDHTFRGFQGQIEAGEVKVGDEITTLPSNETAHVKSIHVGDKLSDSAFTGQPVTIQLDREVDVSRGCVLTIGSGAKVASSITATILWMDDDELFKGKNFFFKLGTKSIPGIVTEIEHTIDVNTGEEKPADKLKKNEIAVVKIAFSDKIVCDKFKNHKTLGEFILIDRVTDMTSACGVVEEVHTEESGLYEGRVDRNVRAAIKGQKAITAVFVDGVDGVNRGFVEDVEKALNIDGRHTYLYAPKEGEDFVNVVKHLSHAGILVLLLISQKQEKALEADKVEFTKDWNKNGRDVDKAAEFIKKQSVYDGVIVNTSEYIMESYKSEFIDFMVESDVLKFGDFTLKSGRKSPFFMNAGAYVTGSQLKRLGEYYAKAIHANYGDDFDVLFGPAYKGIPLAVVTAIAYHELYGKEVRYCSDRKEAKDHGADKGGFLGSKLKDGDRVVMIEDVTTSGKSMEETVPKVRGAADVTIVGLMVSLNRMEVGQGGKVSALDEIHEKYGFEGRAIVTMEEVTEYLYNREHDGRVVIDDTIKAAIDEYYKQYGCKMLGRRKRNRYKFTEKKQSKRGIAALVVAILIEIVYIVFLNAAFRGDGNLSMYYGSAGILMLGISLADFGFAIRSLFDEESFMTFPRLAVFFSLIAVISWGGTYAAGFIIMSYKEIYELSNELYAERLELVEERIEQIVREPAIEPAFADYFRSAAKCINTIKKHSADKEFNDLFYSQFDKENYEKSYANPAYAVKVLGDEYGQLLSAVYAKIAGSITHIYQGDIKYLCIYAELIVELYNYFENANELSPDEIRGCIYSFMHDYEEIFAEDDNRALLDPAYDYYTEIVNEADLSNDDYLYSYGLYVGENERAGRAHLASFSDEEIQAMADTYTEGYRIGFITCNKDISKKSVVQVLYPLGFERMIRAALKNFEKMGMKPAMRPFSTSVNKQFDYDHKEDMALWLDKAYVEYRLECMHNALERMKDVACKCGGPAVIEIFGEEPFAPVSKKEAAHFNDEQQKLVVHMTSVRSQYMNSYIHSEDRSFTIIAYPCAAIGPDYKEIFTETVKINTLDYALYRDMQQKIIDVLDTADRVHIVGTNGNRTDLYVKIHELKEPSKETAFENCVADVNIPVGEVFTSPVLEGTNGKLHVSQVYLNELNFLNLEIDFKDGMIDKYTCTNFEDEEENKKYISDNVLFHHDTLPMGEFAIGTNTTAYRMARVYDIAAKMPILIAEKTGPHFAVGDTCYTYDEDNMTYNPDGKAIIARDNSVSISRKEDISKAYFNCHTDITIPYDELGAITVIRHDGSTCDIIRDGRFVLEGVEELNKPLDTLDAESKMAKVGIVMGSDSDLKVMSKAADMLEELGIEYELTIISAHREPDELIEWTRGAENRDVKVIIAGAGMAAALPGMCAALFALPVIGVPLSGKNLDGMDAVFSIMQMPPGVPVATVAIDGAKNAAILAAKILAAGDDVILEKIKKYTADMKAQVVAKDAKLKQVGYKQYLAEKMGILQKADSCMDEAAALFGENKLFLAEKKAQETAGLYKSCGAYEQMAKTVNLMGVIYASIGDVSMSIDCYLEAMDVAVEQGSTEIIMLVNNNIGSLYMELGLYEKAIRYFNEALELCKPPLHGERDSYYQELLMLHLNLCISYTGINEFEKAEKHLSDAILLNDIAGSDKNRFLIDMSQAHLLWKMGNEDEVRDHVEELVEGAINNIDSADYVLEILSLCNLFMNMGEFDAWKKVIVEYERFATDTQNLFFQKTCVKMWMKYESAIGDTEAYNKLCVYYANLHSMQVKEQIKRLGDTIDLKLQLQETEYERRKAVRLNYTDMLTGMGNKFKMRNDFEKLVSKNQDSDGAGITFGVVDIDFFKSFNKNSGRVTGDAVLKEVSSIINESVRDNGMGYHFYGDEFYIILQETDEDIIKNIAEHIRLELAKKQILHESSKVDEYLTVSQAYVTAPDVKVPDEFSKLFKTVDEVLNDVKENGRNAYKIVMLQLERQQKILDYLKENRKATTNELSELLGVSTTTIRTDLNQMDKEKLLTKTHGGAIYKDKTHDMTDLTSRAYLFHDRALENKEAKEEIANEAIKLVSDHMCIFLDASSTAYTLGMKLSGFTELTVITNGINLALELKDIPGVTVILTGGIVTSASASIEGLLGADLLKKIHTDIAFVSARGFSVEDGLTDFSIYEADLKHMCIKASAKTVALVDHTKFDTTSISSYASLDDINMVITDSGISPETADIYEKAGTDIVISGIMKFFVDTANVEDIKKANDMGVICGVTTNPSLIAKEGRDFNEVIKEITSIVDGPISGEVKATTVDAEGMIKEGREIAAIHPNMVVKIPMTVEGLKAVKVLSSEGIKTNVTLIFSANQAILAANAGATYVSPFLGRLDDISQPGIELIRQISEIFDIYGYDTEIIAASIRNPIHVTDCALAGADIATIPYKVIEQMTKHPLTDQGIEKFQADYRAVFGDMNKLELQITANEVRKGIVTAVHSAKAGHPGGSLSAADIFTYLYFEEMNIDPKNPKKPDRDRFVLSKGHTAPGLYSTLAQRGYFPVEDLKTLRHLGSYLQGHPDMKHIPGVDMSSGSLGQGISAAVGMALSAKLTNDDYRVYTLLGDGEIQEGQVWEAAMFAGFRRLDNLVVIVDNNGLQIDGPVDQVCSPYPIGEKFKAFNFHVIDLKDGNDMDQIADAFKEARNTKGMPTAIIAHTVKGKGVSFMENQVGWHGKAPNDEEYAVAMEDLRKEGEALCQKMSEVKKIATRVSYGNALVELAKEHDDVYVLDADLAAATQTAIFKKEFPDRHIDCGIAECNMMGIAAGLAATGKVPFASSFAMFAAGRAFEQVRNSIGYPHLNVKIGATHAGISVGEDGATHQCNEDIALMRAIPGMVVINPSDDIEARAAVKAAYEHEGPVYMRFGRLATPIINDNAEYKFEIGKGVTLREGTDVAIIATGLCVAESLAAAEKLAADGVNAKVINIHTIKPLDEELVVAAAKECGRVVTVEEHSVIGGLGAAVCETLSRKAPTPVKTIGIQDCFGESGPAVALLKKYGLDAEGIYASVKDFLMELICKKCLLREMAEADAAMIKKYVDAIKGEDRVPEKEYEARLAVCKACDRLNAGTCNACGCYVELRALTGVSHCPHKKWMIHITSLDDGLELFKALGSDIRIQILKILLENNQMSMNQLANELNISNGALTGHIKKLEECGLISASNDSSGHGNQKLCSLIQDRILVEIEKPIDLNNVYNTSIKVGQFSSHNICPTCGLATSSFVIGELDDVRYFDHPDHFNADIMWFTKGYVEYVIPNLIPRNQKITQLSLSAEISSEAPGTDNDWPSDISFYINDTLVGTWTSPGDYGDVRGMFTPEWWPQNWNQYGLLKLLVINHKGTFIDGLKISDITTSELKLDYTSTIRFRIAVDEDSAHVGGLTIFGKSFGNYDQDIVVSINYAPLDTEKNTKMAKIIVNNENKKSTIAPEIYGHFSEHLGRCIYEGLFVGENSDIPNVNGMRTDVVDALKEMKIPVLRWPGGCFADEYHWMDGIGPKEKRKKMINTHWGGVVEDNSFGTHEFFELCRQLGCKTYVNGNLGSGTVREMSEWVEYITFNGVSPMADLRKENGHEEPWTIDYFGVGNENWGCGGNMRPEHYADEYRRYQTYVRNYAGNQPINKICCGPNVDDYEWTKKVMATCFDHCEPRSHGLMDGLSLHYYTLPETEDDWNIKGSATKFTEDIFYQTLKRGYFMEELINRHGAIMDEYDPDKNIGLIVDEWGIWSDVEPGTNPGFLYQQNTMRDALVAGMTLNIFNKHSDRVKMACIAQLINVLQSVMLTDGDKMIKTPTYYVFHMMRHHQGAALLDSSLVGGATVGSGKNELPKVFESVSEDKDGVITVTLTNNSLESSEDVDIMLTNEGDKYSVSEARYIEGAMDAHNTFEAPEVVDEKDFTAYENTQTGVKVTLPACSVVTLRLSKMDLKNIKIEDPFWGHMQELVTDVVIPFQEDVLNDRQPGVEKSHAIENFKIAAGLSQGEFYGMVFQDSDVAKWLEGVAYSLIIKPDAALEKRADDIIDIIAAAQQPDGYLNTYFTIKEPEHRWQNLLECHELYCAGHMMEAAVAYYEATGKDKLLKVMEGMAGHIIDRFGPDKLPGIPGHQEVEIGLMRMYHATGNEAYKKQARYFLEERGKNPAFFAEEAAKRDWNHFGMVPKDIKYNQSHATIYEQEEAVGHSVRAVYMYTAMADLAATEHDEKLFAACERLWNNMTEKKMYITGGIGSTVEGEAFTKEYELPNDMAYAETCASIGLVFFAKQMLKISKNGKYADVMERELYNGIISGMQLDGKRFFYVNPLEVNPGVSGEIFGYKHVIPERPGWYACACCPPNLVRMVTSLGRYAWDEDDDVIYSHLFIGQEARLKKADIKVVSEYPWKGHVSYSITPKTGDEFAVAIHIPGYLKSFEVTLNGMRLKENSEAKADVFYSYRDGYIYIKNKWHDNDVIEISFNMDIRVIYANTKVREDIGCAALQRGPVVYAFEGVDNDDDVQSLMIDVSRLNEAQIETEAEGTLKGAVLLDIPAVRLESSDALYSEKPPRQKSVIARAIPYYMWGNRGLNQMRVWMHTIYNMQSKFKRILFGGDYNPNQWPREVWEQDMAYFKDAHINSATINVFSWAKIQPSENEYNFTELDEIVDMLSNENYDIVMATSTAALPAWMVKKYPDTMSTDYEGRQHKFGVRHNFCPNSLVYQKYAKALATELAKRYSGNKNISVWHINNEYGGYCYCDNCQKQFRVWLKDKYKTLDAVNDAWNTEFWGHTFYDWDEIVVPNELSEETWGGMTSFAGISTDYRRFYSDSMLNCYKLERDAVKAIIPDALVTTNLMGTFKGLDYFKWAKEMDIVSWDNYPAYDTPWSMVAMTHDLMRGLKDEPFMLMEQTPSQQNWQHYNSLKRPGQMRAQSYQTIAHGADTIQFFQLRRSKGGCEKFHGAVIAHVGTNDTRVFKETAQLGRELESFGTRTLGTRNKSDVGIIFDWDNYWALEYTSGPTQDLKYVDQIHQYYEYFYNKNISVDMIPVDGDFSKYKVIAAPVLYMVKEGMKEKLEQFVKNGGTLITTFMSGIVDQSDNVHLGGYPGPLREMAGVWVEEIDALAPEHSNTVSFSDGKEYKCNLLCDLMHSEGAEVLATYESDFYAGMPAVTKNIYGKGHVYYVATQLEAAGLARVLDEATDEVSVSGVIAEKTGLEITCRESENTRFYFVMNFTDEKHTLPASLAGMVDLITGEAAKEGDVMNKWDVKILQEALMPIYFGSNFAREPFQFDSVGNDWEQESVTRPEGYPLYHYLQTKEGVGEVTVYSRNQAVSDNILLNSHTIELQKGQGILIAPNVPHSYHNKNISSGNSLPWKTEFATFTGTMAAAFREMFDEKEYRLIDENKGMEVSEAINRAVEDFKERSSDTQMLSLDCYGIMLLLSDQSNHTHDNDDQSYVRFIKPVIDTIEESYMDDISAKELADRVFVSQQYLSRVFTEFMNCSVYEYLTNYRINKAKELLLINSRRKVQDIASDVGYSDASHFIVMFKKLTGMTPAQFRKLHIMSDRNRILCEFRNKTKSIMGDSLKQMILYGSYARGDYGDNSDMDIMVLTELTDDRIIQIEDEIFDAAYDIELEYGVPISVNIKNEKHFKNWVNSLPYYSNIQKEGIIIAMEHIILLFFSFFTEAVILWQYASSLFTSSYSNKIKLALLSAFYAILFLISLLGQTGLNAISFFVINTIFLYMLFKLKLLLALFHSAILTAIMGLSELAVFGIISRFFPHFVLETDAGIIFYTVFSKILFFAVIYLLIHLLKGKNINQEQYDRSGLLLMLIPVSSVFIMFTFLAIGETSAFAQPVDFMVTICAVFLLMVNLLVFGINQYNQKKSQEYTDMQLLLQKESDSAQYYEMMLSQNENQSILIHDIKKHLQSIKLLNEKNDSDKINAYIQQLLESSDLKETSKICDNEMLNAILCRYQRQCNEKHIVFHTDIRSDTVQNIYQHDLTSLFCNLLDNAVESADNIPDSYIELTVEKKENSPFIIIILINSCQNTPVYDQDGVPVSHKSNKGRHGFGIKSIKKVVKQYHGNLQMYYDNDSGTFHTIITLKQMRILICDDDTLIIEQLQKYIESYFESNHLKCPELVSFTSGESLLADKNEKDIVFLDIEMPGMNGIYVGNELKKANKNVLIFVVTSYSEYLDEAMRFHVFRYLSKPLDKQRFFRNMKDALTYYNSITTKIPVETKQGVYSFPASQIIAIEAQERKVIVHTARQDFDSIHNMDYWLEHLPKNSFFQTHRSFIVNFEHIVDFDHSTIHLSNQQITAYLTRRKYSSFKNAYLLYLESMRMGNRIKIRRKELRIKQAELAEKLNISNNHMSSIENGRQKPSLDIFIRICDLLNVTPDYLLLGSMHAYNIPQDIIDKLRLCNQSDIELAGDFIELLVKRNNKTHNEPKLMKKRVTKSVAKGMKAALDVVLQTEANTASCIIMYQPKAPKELMNYRRNKMEKCTDTVVDWMIRCNVINEADKELYKYALHSLLLLVSPLILAGGIGFGLGSVKHGVALIFPFMFLRKFSGGYHAKKLHTCIMGSGFLLFLCIMVSMHMQCDWKLAIATGIASVSLIAFSPIDSENRRLDTDEKRTYKKITVFCVIFFGLLDIVLFLLGKYIYTICFSVGILLTAGLQAPYIVKKMRKSTKNGLMVSQKKKKGKEVIIMLKKKLVQVTAAAMAATMLFSVPAMAKKNFFSFNVKTSVNDGEAFSAGNHKNDAERQAYVVTQDSNIISTDAFYYAVFNYPKDTARYQYAYHTKMSSRTGTVHPQYYKSVTAGQTMYLQADTDKYIVWADGYWFSMKKKIRKIGMLSSIALMICLGVTGCYPDGKVSLEEKKETDSNQINIDENASHIEGKLDEGLFVNAQTDIKSDADWHDNNVILKSWDVDKVSNVFGNGRNISENKTMPNMHNDNLNDNYIYWDDGSSIVIQNGNLQYNTKTELEYSYLGYLYGTMPYLTDETTEKFPETEISGIDKEAAIEQVKSILDEIGVEVSKPRVYSLTYEKLEENTDYSQTDPNGNAPHQWTKEDAAYAIVFKGTIDTLPITEVGYRSGPAAGERIVGIVGKQGLIAFHALNIYELETENELSDEILTTQTVLENIQQKFRNIMITDKVEIEKINLEYVPVLKNVEKWEYELKPMFVCMARQNIEHSTDKEDNGLIGDSSIFPIIFDAQTGMEIQIGGTYMILQQLKADYKRIFSSPKMYLSILGVVLLCYISTEKYIHGSVDIYYILDILIGLSVFKKLIIIFSALPCVTGFYDDWKHQYIKNIVIRTGRRNYIISKIVVCVSISFLVVFLGILIFIGLLIGMGFDYSGINGMGLDENMPYGIFLYQKPFLYVCCIVSIYAASMAVWVMSGLMISSYIPNSFVAICSPLIFSYLLEEITGLLPPYFNMYLLAKASNVLGKNATYSYLYTIFIFTVLILGQGLIFAKRVKRRLGNEISMKSVKISLIVAIQNIRKWRTNYRIWILVILTMIFVQCYTKEISTNALAMGMKSSPWLYPFLYTDRYIRILFMLPLIFIYCDAPFIDKNQIYILMRCKRKLWSIGQIIYIFMTSAMYFSLIAAMTIVLNIRNIEYMNDWGKVLGTLAFSNVPLVKGTAVTISTYILTYFTPTQAMFFTWLLSVLCGGILGLIIYGCNVISKSKIVGIVASGFLVILSAAVSGNEMAQWFSPVSWTTLNKLDVGKLTQYPTFTYVMVVYMTAIIILSVWIIKVIEKKDVGVMIREVMEKLIQIKNLTKCFGETKVLDKINVNFDRGHIYGIIGRNGSGKSMLMKCICGLVVPTSGEIIIDNKKLGTDIDLPENLAGIIEEPGFLENYSAYKNLQFLSMIKNKIGKEEIIQTLKSVRLDPYSKLHVGKYSMGMKQRLGIAQAIMEKPEILILDEPMNGLDNDGVMEMRKLFINLREEGTMIIIASHNKEDIEVLCDEVFEMEKGKLTPVQHMKTRQEALNYGLSFPNTYQEAPFHDPNWQLIRVKDSKKAFLWTYERNGFINLNVKVSPAWRDFWRDAFPSVIPGWHQNKDNWNTIILDGSIPDDAIKNMIADSYDLVTYNPTRLIYEAVKRIPKGCVATYAQVAELAGNKKMCRAVGNALHKNPNPDEIPCYRVVNAKGELSGAFAFGGADEQAKRLRADGIDVIDGRVDLDKYGIRIADDIIHTKTTVEPFTMEIIMFIIFIVTNLFIILCMQFAYTHAYKYENGMYLNVHIPSSHKKDAEVTEIVTTGKCKMKHFQIANMIISIAICFIVFFNIAVFVLVYIIWMFAYIFGIIHIPNSSHRKMYALKIQNGWIIETQRKKVYIDTRVSAEAGTTTVSYKWHALFLITELAAYIPYFMLGDTHYNILMISLFLCSVLISTLSLVFHAFINKSERHVYSMDSKLNLIVNNTMKKYKSIAMLLLSGLNAVAWIYVALYTGITGILPASSYYVYIFIQLIAVLGFIVPIYMGLNRKKELLSANTSPIDVDDDEYWKTGYYYNPDDKHILIENRMQSGNYTFNYAKKGAWIFTGITCAITAGCIILVFVCMLPLINIQEKITLTNNNLTISAGGYTSEIDVNDITELKLLDELPDDSFLRTNGASTDSYDIGRYEGRTLGKCSLYVFDGYAPILMIKSDDTLVFVNSKEDGEIEKLYVELSQMIIELDMSSSTPIYVQLRNQIVKGIGKGELKTGEKLPTVRQLASDAGVNTMTVNKSYQILKKEGFIRTDRRLGAFVSESIADDTDFTEKLESELELLSAEACLTGMSREEFLSMCDKMYSQMKPCTAMTKFVSDINVLFVLYTVIQKRHSVNGCFSINYIDIWNITIMIKELMSRLIEQIKQKDACAFTHGGKFHADDVFSSALLLYINPEISITRGNSVPDDFTGIVFDIGRGEFDHHQKDSRIRENGVPYAAFGLLWEAVGADILGEELAVKFDESFVQPLDNNDNTGEKNELATLIGNFNPSWDYEGGSDEAFFQAVSVAGMILENKFERYRGNERADKRVEEVLAKHDPASRILVLPEFIPCQKALSETDIAFVIFPSNRGGFCIQPQKREYSMNYKCSFPAEWLGLEGEELVNATGISGAIFCHKGGFIMTVKEQDEAVKACEKALSLHKDSSVIVWYGSKGDTAAMACDSQTDELLINVAKARGIKGVHICHVDAMPVPQLELTELDSETAYAEVLMEKPQWKAYVKEQVKRILKYRPEAVYVEGNAFETYPVIRALRKKHIPVLTMIENKEKKIMVRIPMKTIIKYELVINKALRSALNYDTPDEQINEFIRFFGKHIGSDRIYIFEDCDEKHVTNNTYEWCADGIVPEIHELQNVDMDIIGWWYQAFGSEKNIIITDIEQIKDEHRESYNLLKAQNVKNLVVCPIRYKDEIKGFFGLDNPPESDTLGLTTFLDMIGTLLISLLKLRNSFTKSNKEAKLSSYSSLSSIYISMAVVNVQTHRYHIVKTLDEVTHFLGVKPQKEGEYKIDEDFPGHINSVMNEFCTKAHRKEALEFVDITTVEDRLRGKNTIVHELIGKVSGWCRERFIPVDYDDDGRLWHVLYCVENIDEEKRRENRLMYLAQTDLMTGIRNRGSGENKITEYLVRKQCGLLCLLDCDKFKSINDTYGHVVGDKVIIAIADTLRKSCRDDDVVLRLGGDEFAVFIPGMLDKERAEAFFDRLFSNIEHIDIAEMNGKHILLSLGACFYDGMDCITFDQLYRRADTAMYDSKKKQGYSATIYDAKQMQTGKAISIPSILKVGNGTLNKIGEYLKSEELTSVVIFMGNGLIDMFGDTIMKSLTDAGITVLEYSELDTVEIDDIITLAFDIPNKAKAVVSVGGGKVIDAGKYAAFLRNMPFISVPTSSSSDGFSSASASLLVHGKRTSVPAKLAHGIIVDTQVIRTAPEKFIYSGIGDMVSKITALYDWIFEEKHGAGVVNDFAVMVAKKAVNSFVRTPYESIKDELFLKELVDSLAMSGIANEIAGSSAPTSGSEHLISHALDKILEHPQLHGIQVGIATYIMSVVQNHRYVRVCTVLKRTGFFDYAATLGMRKQDFLDAIDMAPSMKPFRHTYLHEKEYRDAAKKLVLEDDILNKILVMYEKTIEPVAIMHTGFGEKFGIPRQSGLVPEAAGRIIFEPKYQNPDALRGIEEFTHLWIIWGFSENRVEKFTPLVTPPRLGGREKRGVFATRSPFRPNGMGLSSVRLDKVEYKSSKGPIIHVSGVDMLDGTPIYDIKPYLAYADSHPKASDGFAAEHRWDTVHVIWRDEALKSCMDEDTRITVEHILAQDPRAAYNKAKDYIYGMRYGRFDIRFVADSHAGAIEIVDVVECIDGYHKVKMKTVKDYIRTIPDFPEKGIMFRDVTSVIQDADGLKLAIDEMIKRLDGLDFDVIAGAESRGFVFGMPIAYALHKPFVMVRKAGKLPCETVSKTYDLEYGTATIEMHKDSIKPGQKVVLVDDLIATGGTMQAAAELVEELGGEVVKMLFLIELAGLNGRKLLSKYDVDAVVSYDGKMQQKLGKWSLRFTEAPFILESSSVVGTKEADGPLGGLFDIVGKDDRFGQNTWEKAESSMQRDALTMALGKAHLDASDMDYVFAGDLLGQSMATTFGVENFRIPWFGVYGACSTCGESLSLAAAFVAAGYAKHAVAVTSSHFGSAEKQFRFPNQYANQRPVSATWTVTGSAAFIVGSGAGGNETQIGCDNADSISKKVQIEGITTGVVVDYGIKDAMNMGAAMAPAACELIVNHLSDFGREASYYDRIVTGDLGSVGQKILIDLCRQKGVDISKNHEDCGMKMFDATNQNTGSGGSGCACSATVLSAYYLPKLRSGELKRILFVPTGALLSPVSFNEGESVPGIAHGVVLEAAIMDYVKAFVVGGIICAIVQILMEKTKLMPGRIMVMLVCTGAFLGAVGIYGPFSKWAGAGANVPLLGFGNVLWKGVKEAVDSEGFIGLFKGGFKACAVGVSAALIFSYIAALITKPKLKSMKKMKYLLALCLILAAASAFAACGNNSNVADTSMVENTQRGGSAADDAGKAGKDIIDGAGNAGKDVIDGAGDAGKDVIDGAGDAGKDVIDGAKDAVDDAGNAIKKSVDGGNNNMKKNTYIKMTAPFRENNRAARKLELINKICTYLVFITYPVYVLYLCFTAGHMLALSIIAPLVGFIAVSVFRYIVNRPRPYEKFDMPPVITKDTHGRSFPSRHVFSAFIIAFTVLICSPAASPLWFIGILLAVLAAIIACVRVISGVHFISDVVGAFVFAAIEAYIVTVFFLMNILEYENYHEDKTHVELTFPYNTYLCSIPLDFSGVPLHWHDDMELIYIKKGCGHISVDFKEYHVTAPSLVLILPGQLHSIDQYMDESMEYENIIFSMSMLLTGKYDYTKEDFLTPLLAGRFTVPTVFTPVYPYYEDVVAPIDACDEICKTMPQGYQLYIKSKLYEFFFVLDNRCRNLTKPLKSKKTLDKMKVVLKYVENNYADKISIADIADVAGFSESHFMRYFKETMGTSFVDYLNDYRLTMAARLLQSSDSSVLSISGEVGFESLSYFNRAFKKHYGMTPLQYRKGSMAIMQEIETKLQKGISVSTDEEVYYALLELVKDKAEKKVSNKGKKKLYYISAEFLIGKLLSNNLINLGIYDEVKETLEKNGKSLAEIEEIELEPSLGNGGLGRLAACFIDSIATLGLNGDGVGLNYHYGLFKQVFENNLQKETPNPWITKESWLTKTDITYPVSFGGFTVQSRLYDIDVVGYNNRTTKLHLFDIESVDESIVGDTIDFDKDDIKKNLTLFLYPDDSDDKGRLLRVYQQYFMVSNAARLILAEAEAKGSNLHDLADYAAVQINDTHPSMVIPELIRLLQEKGILMDEAIEIVSKVCAYTNHTILAEALEKWPISFLEKAVPQLMPIIRELDNKVRAKVADESTYIIKDGLVHMAHMDIHFGYSVNGVAYLHTEILKNTELNNFYKLYPEKFNNKTNGITFRRWLMSCNPELSAYITELIGEGWKKDANELEKLGNFINDDTVLTKLVDIKNAKKTELASYLKKTQNLDVPDNSIFDIQVKRLHEYKRQQLNVLYIIRKYFEIKAGKKPSTPITCFFGAKAAPAYIIAKDIIHAILCLQQIINNDPEVSPYLKVFMVENYNVTLAEKLFPAANISEQISLASKEASGTGNMKFMLNGAITLGTSDGANVEIAELVGDENIYVFGEDSQTVIDRYERGDYCSKDYYDKDADLKKAVDFLVSDEMMKVGSKENLERLYNELLNKDWFMTFPDFEDYCKTKEKAYADYEDKKAWAKKMLVNISKAGFFSSDRTIKQYNDEIWHLEAMIKNKFMALTLTVVLTAGMLTGCGSDDKAKDKDAYRQYGINCIENGSYDDAVDAFQKALDQSVGSVGAEELDICYYKAKAQYLSGDVDGAIDTYTAIIDYDKDSDAYYLRGCIYFAKNDSDKGLKDFKTALSENNDNYELYLGVYETLSKYGMNDQGKEYLDNALKLKAKTADDYMQRGRIYTMLGDYDSAIKSLQKAIDEKLVKANYYMGEVYQKKGDNDSSQKYFKKYLDSGEADSYDLMNMGQAQMDNGNYDTAITYFQNALELESVPNKQQITKAMIIAYEYSGDFATAKSKMEEYMKDYPDDEDAAREYQFLETRMADTIKIEDIEERVVLVGVSEQDGDDADDSLSELAELVKTAGATVVGTLIQRREKIHPGTYVGTGKVAEIAELVESTGATGIVCDDELSPAQQKNLETYLDTKVMDRTLVILDIFASRATTSEGKIQVELAQLKYRLSRLSGLGKSMSRLGGGIGTRGPGEKKLEVDRRLINDRIAQLRRELKEVQKHRDITRAKREKNKVPVVAIVGYTNAGKSTLLNHLTEADVLEEDKLFATLDPTTRILALDGKQQVLLTDTVGFIRKLPHHLIEAFKSTLEEAKYADIIFHVVDASNMQREKQMFITYQTLDDLGVKDKKFVTLFNKQDARTDNEPLHDFRADYTLNISAAKDLGLDEVKSLLEEILRENKVYIERIIPYDKAGVIQLIRKQGELVSEEYVADGIQIKAYVPMEVYGRLDMLLRYIIILSEEFKMSKTRSIRWDKLDNTANLFPSIAGESMTNVYRISVTLTDEIDSEKLQEALDIVLPKFGLFNVRLRMGVFWNYFEENGKKAPKVHEENTFPCRFIRPNKNHSYLFRVTYYKNRINLEVFHVLTDGMGGINFLRELTYQYLRLTHPEIAKLKGDSLTQGTSLNREDSFVKNYKSSKPSGFNRQKAYLLKLEKVPDGEFGLIHGMMPVSQLKQVCHRYGVSINDYLVACFVWSVYQECFHGMPNDMPVRVAVPVNLRPYFDSVTTKNFFVMISAEFRPQNSSYTFEEVLKIVTDSINSQISKEHLEDLFSYSVSNQKNILMRPVPLFIKNLAMKAVYTQSALANTTTITNIGNIKVEPEYEPYITGFYSFIPMSKGQPMKGTICSYKDTLVFTFSSILADTMIQRSFFKKLVNDGVEVTIETNGEYYDMTKCMKCGVYIADNTDKCPLCQQVVAPVELSSDNHQGTEGVFEQHNDVPDKCVNDTDSAAKRADSTDSTASHDNGTRYPDVKGASRKYRLLENIILFLSIVGQIVLTTVDYMTDHEINWSFIVLLVVIYANVTLRLAIVGRNGYIFKIVSTFVFTVLFLEGIDLLTGASGWALTFVFPSAILAMVLATIILMIVNIRNWQSYMMMQLFLVLMSVIAMILVAVKVIWFPYLAMGAMGASLFLFLGTLIIGDKRARTELKRRFHIMIGFHGIGNSHMFEDEEMGNYHPEIENGDSNGDNETGIIGALGNKLEKTFKNSLSAMKSEHVEKAHSNAAVADEEVSIQGKILANLMGHITNDLAIGKKIKSGELRKRMKEPAWLVPDCFVTEDIDMGGFTMKLLSSKENPNTERVILQLHGGGYMGAVRNAYYVFAGLYNEVSEGCSVLTPDYRVAPEHPYPAALEDAIACYKWLLSQGWFGSQIVLAGDSAGGGLAMCLTMYLRDHVMPLPAGIVAMSPWTDLTAGGESYETNYEKDPLFGNTRDSLIYVNDYPGDHDKMDPYISPLFGNFRGFPPMLIQVGSIEMLLSDSVEAAAKARIQGVKVRLSVYEGMFHVFQMGYLNFPESKRAWAEVKRFLKVIKEEEMITGELRNKIDKIWETFWTGGITNPLDVIEQFTYLLFIKQLDEVETTKENEANFLGVDYESMFPGECQKYRWSKFKNLGSAEEMYELVLNGVFPFIKNLHQDGDSAYARYMGDAIFKIPTAAMLSKIVDGIDKLELGDEDSKGDLYEYLLSKVATAGTNGQFRTPRHIIKMMVELVKPSPDDTIIDPAMGSAGFLIEAQSYLRENHPELFLHKESLEHFNNTMFYGNDMDRTMLRIGAMNMLLHGVENPNISYRDSLSEQNTDVEKYSLVLANPPFKGSLDYEAVSADLLKVTKTKKTELLFLALFLRILKKGGRAAVIVPDGVLFGSSKAHKQIRKEIIENNKLDAVISMPSGVFKPYAGVSTAILIFTKTGSGGTDKVWFYDMKADGLSLDDKRQEIADNDIPDIIERFNHLDAETDRKRTDQSFFVPVDEIVSNDYDLSINKYKEIVYEAVQYEPTDVIIGKIDALESEIQGELAELKKLLDVMRVKLEDVCERGSSNIKQSDIIKMSGNYPIYGASGLAGKVNFYHQEQPYVAVVKDGAGIGRTTLNPAKSSVIGTMQYLIPKKNVLPEYLFYVVSYMHLEKYYTGATIPHIYFKDYKNEEFNLDNIEKQLEIIDVLGRCKKVIEARKQELVELDSLTKARFVELFGDPRSNPFGFEKKRLKDTCKVITGNTPSRAIAEYYGDYIEWIKTDNIVSGILNPTQATESLSEKGMNVGRTVEKDSILMACIAGSIASIGRVCITDRTVAFNQQINAVVPEQYNILFLYVLFQMSKDYLVEDINMALKGILSKSKLEEKEFIIPPMDLQEQFSDFVKQVNKSKVAVQKALDETQILFDSLMQKYFMYEKYLLQLEEAGKIRNLKERSIDCYKNYVSYFLNYMEKVPEELTCQDVRDFLLAKKDDGLKATTLNLYNSAIRFFYRNVLHILWDDITVPRMMIDHKLPVVLSVDEIDKLLDATDDLKYKAMFATMYSSGMRVSEVVHLHYGDISRTHMQIHVRDTKNRMDRYTILSERNLALLTEYWFACGKPRDILFPNKFTGEYLTVSSVEQVIRRSAATAGLSGVTPHCLRHSFATHLMEQGVERQNIQALLGHRDPKSTEVYLHVSNKSLMGIQSPFDRKAGADYEMNKPTVQDIFQCFYPAYLEKYSPSPEQAKVARNILNCKTGAYGANVSVCEDCGAVQVHYNSCRNRCCPMCQAVPKEIWMDARREDVLDAPYFHLVFTVPDILNPIIYSNQKLLYDTLYHAASATISELTADPKHLGANVGYICILHTWGSEMNFHPHIHTILLGGGLTSKNEWKDNGTEFFLPIWAISRVFRGKYMDELKNLWNTNQLEFHGTAEKYRNHYTFKELLDSCYDAEWIPYCKKTFNGAQSVIDYLGKYTHRIAISNHRIIRMDDETVTFFVKDYRNKGEWKELTISGIEFIRRFLMHVPPKRFVRIRHYGLLCSRSKRKKLTLCRNLLGCKKYLSKLGDKEMPEILKQLYGINVCVCKSCGGHLGKPQLRIPQRCMKKHVQTDSEWQEEMSQKIIDEIQCELYLDMPFMKLALSALSPKVNEQLYSMATDGTYIYYNPIRLIDIFKKNGMYLNRAYLHSVLHCLFFHLWTKGERDEFLWNTACDIMVEYTIDTMEKKSTKRILSYIRKTTYERLKKEHIVIAPGALYAWLYKQYAEIEAEEITDIDDIANTKDKNELALLAREFYTDDHAFWPEEKNDNAMPLSSSEAQKQWQKISRQTRMEKKHSKDSESEGEQVMMRELSAKRSRRSYKEFLRRFAVLREEVHADYDSFDMGYYAYGLSLYGNMPLIEPLETRETYKIRDFVIVLDTSYSVSGELVEHFLQETFTILTESDSFFVRNKIRIIQCDDSVKTDEEITDEKQIKPLLNKFTLVGGGGTDFRPAFSYVRDLLDKGELKNMCGLIYFTDGKGIFPAKCPSYKCAFVSVGAYEGNEVPPWAMQVELEETIMNIKQAKNEVKNTVKAYLSKDAHGEYVIPQIRQRPMLLIGPPGVGKTQIMEQIARECKIGLVAYTITHHTRQSAVGLPFIKEREYDGKSYSVTEYTMSEIIASVYERMEATGLKEGILFIDEINCVSETLAPTMLQFLQCKTFGNQAVPKGWVIVAAGNPPEYNKSVRDFDMVTLDRVRYISIEADYQVWKEYARDVHIHDALLSYLELHPNNFYRVETDVDGMNFVTARGWEDLSSLLKVYEAGELAVTEDVIGEFIHHPDIAEDVYAYLEIYRKYNEDYGISDILTGNVKKSVYKRVFDADFDERITVVNLLLSGLTVVFSDVARERKMVQLWYEFLKEYRKSQRSTEEQHALYNSAVEQFSKNMEILKESSLILPKEYYIRQDVLRHIKGDFDTVMDDFTEESEKLSTMEDAAGEKLNHAFDFVEDVFSDGQEMLVFVTELTITPEISSFLAENECEKFDIYNEKLMVGSNRTRLLKELERMIYIFSAFYAEAKNIIDHYGLKKEKSPEMVRFDVFANDSIRLVITGVGEINAAAAVSNIGGAYGISPDDEILNVGCGAGFSSDICLGSIFLGNKLTEQMTGRTFYPDMLMKANFRECEIVTVARVLNEGSDSVVYDMEAAAVYQAAAFFVGPHRMHFIKLVSDAGERIDQSKITELFALQEDKICGYIDILLSVGGNKTSIDDKTKGENMADGNATDDTKSAWNINRLTSDMRCSKVMGDQLAQLIKYCRLSGIDYKAVLDEYYTNGLLPCESKREGKKCLFELKQRLLMCQYNKMFSHVYVEKGVAEHPRTKQILEKLNNTTVIEIDHYKDVFCRKKQSISAQSNAKALILAENTSGCIYEGAPVCQSFGNENFYYCSCMMNCIFDCEYCYLKGMYPSGNLVVFVNLEDIFAELEALLAQKSIYLCVSYDADLVAIESLTGFVREWIAFTKKHEKLTIEIRTKSGRCDLWCNYEACDRVIIAYTVSPQRGAAEYEHFASAPMERIQAAKCAMDSGFPVRLCFDPMIYCKDWRGEYSRLVDDVFSQIDGSKLWDVSIGSFRISQDYLKKMRKDMPRSAVVNFPYDNVNGYYQYPENIRSDMEEFMIQAVSEYVDKDRIFMWKMNKAIVTGASSGIGKAICRQLAANGWLVYGIGRSFNQSDDIAGIERIVCDITDTAKLIKTIKEINKNHDISLLINNAGVGFYSLHEELNPVKISQMVRTNLEAPMVITNLLLRDLKKNKGTIINISSITAEKTNPHGCAYGATKAGLTSFSHSLFEESRKYGVRVVNLEPDMTDTNLYRNADFTVDENEAARIQPNEVADAVLYVLGQREGLVMTDITIRPQLHRIARKMKFFLAPMQGLTGYTVRNAFHHHFDYIDKYYTPFIPAAKRMNAKIKRDIDPVNNDGITLIPQAMSIVADEVIDLHRQLVPYGYDEINVNLGCPSGTVVSKKRGSGILAYPDMLDSFLDELYTKADFPVSIKTRVGFNDDELWPKLIEIYSKYPISELTVHPRVQKDFYKNTPRMDDFALAMQKINPDKTILCYNGDITDTNSFNALTDRFPDINEIMIGRGLFANPALIAELKGISMDKAELRERLKNWHDEILSGYLSIFSGEKDAIFRMKEIWAYMHGLFSDSEKLWKKIKKCQTLNDYKSIVRMAFDAFMSYADKVFVAMCQDILENGTSTEGELVRPHWEDGTSAYTIKKFGVVNRYDLSKEFPAITLRKTYIKSATDELLWIWQKKSNNIHDLKSHVWDEWADEDGSIGKAYGYQLGVKHQYKEGMMDQVDRVIYDLKHTPFSRRILTNIYVHQDLHEMNLYPCAYSMTFNVTQKKGDDRLTLNGILNQRSQDVLAANNWNVCQYAVLMHMLAQVCDMRVGELVHVIADAHIYDRHVPIVKELIERPQYDAPKFWLNPDIKDFYQFTTDDIKITDYVTGEQIKDIPIAVMNLIAAVDNNWAIGKNNQLLVRIPMDQKFFREMTTGKVVVMGRKTLESFPNSRPLKNRTNIVLTHNPSYEVEGAVVVHSLDELHKELEKYNSEDIYIIGGQKIYEQLVDECDVAHITKVDFEYDADAYFPNLDEKPEWQITGDSEEQTYFDLEFYFLRYEKVKMDITGRKLFVKALEEEGVDTIFAYPGGTVTDLFDELYKTNSINLVLPRHEQGLIHEAEGYAKSTGKVGVCLVTSGPGATNTVTGLADAHYDNVPLVCFTGQVPLPLIGNDAFQEVDIVGITRNITKYSVTVRDRKDLGKIIKMAFHIARTGKPGPVLIDLPKDIQTASGPAEYPDKVEIRGYRVNDTVHVGQLKRAYKMLKSAKKPLILAGGGINVARANENLRRFAEAENVPVVTTIMGKGAIPTTHPLYVGNCGMHGKYAANKAVSECDLLFSIGTRFNDRITGDLNEFAPKAKIVHIDVDTASISRNVVVDVPIVADANVALDKLNEWVEPKKTAEWQKQIKAWDEENPLGMRRDKGMTPQMIMEHINKNYKDAIYVTDVGQHQMWATQYLELDSNSQLLTSGGLGTMGFGLPAAIGAKIANPDKDVVCISGDGGLQMNIQELATSVVQGAGVTICVLNNYYLGMVRQMQQLFYGKRYSATCLRRRKGCPAECKGPNEACPPYTPDFIKLVESYGGHGIRVEKEEDIDAAFAEAKKYKDVPVIIEFMIATDEIVLPMVKSGNPMSEMILKMNNNEMKNRWIALYVENEVGVLAKVSGLFSAKSYNLQSLTVGTTEDETISRMTICVTSDDITFEQIKKQLNRMVEVIKVIDLTDVPLHMKEILYVRVSKLTREEITDIFQTAQVFNIDVVDKNADSVILESKLTEHRNDDLIALLKSQYKHISVVRGGAVAIEAMSTGCRMHTFQPYPIDMLDINPFTKLSKEWALVTAGDKEKSNTMTVSWGGTGVLWGKNVVFIFIRESRYTKNFIDNGEFFSLSFLSEKYRDALKYCGAHSGRGEDKWSKAGLTPATRHGIPYPDEANLVFLCRKMAAVPIEEASFTDKAIMRQWYGDHDMHTMYVGEIIEVAARMLSKLAFLYIFNLALLVAYAHYIICVALCAYYCKKILRMKNLHILQQESIDEGRLQVRVRQKNMGTPVADARVSVSYSGDPQGKIEETDTNESGSIEAVEIATPPLEYSMSPSESQPYSEVTVTVSANGYRNITVSGVEVMPDRLSIQDIELEVLDAPGNDVDNIVIPAHTLYGDYPAKIPEPEIMPVAETGEIVLNRVVIPEYVIVHDGAPSDSTAANYYVRYKDYIKNVASSEIYATWPDATIRANVLAIMSFTLNRIYTEFYRGKGYNFNITSSTAYDHKFIYGRNIYDNISLIVNEMFENYLSRPNVKQPILTQYCDGQKVSCPSWMTQWGSKSLGDQGYSAIEILRYFYGSNMYINTAEAVSGIPASWPGYNIGIGSSGQNVYQIQKQLARIAKAYPAIPSIVPDGIYGPKTKAAVEKFQAVFGLPVSGVVDYNTWYEISNIYVAVTRIAELAMILYKIKVTIHNPIFQIKKDNFMNTETQNYKIIVAYDGTRYKGWQVQKSTDDTIQGKLQHVLSTLAGKPVEVIGSGRTDAGVHAVGQVASFHMPKHFSKDEIFIWLNEHLPADIAVTDISNVSDRFHARYNAVSKTYVYTIHTGIVSDVFRRKYVYDYDKPLDTDRMKKAAAYLLGEHDFKAFCGNKHMKKSTIRTIFSIDIEKTGADIVISYTGDGFLQNMIRIITGTLIEVGDGRKNPDAVMEILASKDRAQAGYTAPACGLKLERVDYGKVVCMAKWYVSAKKADFAAIGAKFGIDQVTARIIRNRGVIGDDAVNEFLNGKISDISDPALLKDGQRLVDILVQKIADKAKIRIIGDYDIDGVMSTYILVKALKRAGACVDYMIPDRVKDGYGLNVHLIDKAYEDGIDTVVTCDNGIAAIEEIAHAKELGMTVLVTDHHAVPFEDIKGIKIYKESKADAVVNPHQIECSYPYKELCGAAVAWKIVILLYRKIGIDEKEAMDFIENVAFATVGDVMPLTGENRILVKAGLKSIHHTTNIGMKALLECCNIEAENVDAYHFGFVLGPCVNATGRLDTAKRALELFLCDRQEDAMRIASELVALNDDRKEMTAKGVETAVEIYERDNYEKDRVLVIYLPDVHESIAGIIAGRIREKYNKPTFILTKSEDGVKGSGRSIEEYSMYEEMCKCSELFTKFGGHPMAAGLSLPQENVEPFRQKINEYASLTDDDLVPKIHIDVPMPVDYVSMRLVSEFSVLAPFGKDNPKPVFADKNLRVSRMWVVGKNNNVLRLSLISSYGTPINAIYFGDIESFFDYIRQRFGSDALEAAQRGRFNNIVLSVVYSPKINVFRENESLQFEIQYYKMFGNRAKISAEELAYMKEQLDNDRGFFENVNAKSKLIEADFDELEKSRQLEESSLKQLNDNANNVVEFSKDSMDAISALNDSFTECVKAAADNLTSLESAAKAIATQHEDTCVLVENNKHFTAPAKSLSETSDRLEEHVDSCADIAAQMKEQNKQMSVLSLNAAIEAGMLGEQGKLFVEAAESIREASVSYDSAIDAVKQELSEAKAEISALKEQVSHLVGLLKDNNVATTKLMKQGVELNHVFSQCDEISVDMIEACRQQIVSIRNTQEEIIKFEERNKLQIEDAYAEISTQRKNSVEIKSTVDKVLDYSRERVRMKKIQNKLIELFNRYKHVWILSYFIIYLTWFGYLERTVTTHYHLIHLPIDDYIPFCEYFVIPYIMWFGYVAFGIAFTALHDKKEFYRLCAFLYTGMTVFLVISTLYPNGHNLRPYYFTHHNMFTALCEWLYSTDTPTNLFPSIHVYNSLGIHFAVMHSSYFKDKKHVQHASLVLCVLIILSTMFIKQHSVFDVSTAFMLAFVMYNVVYIKNWMHLPQKSGSFQDAANRKVRIMLFAADKYFTKSSLYKVSIINFFIKFIKSFVLVLFELFFSVIISNGLKRWFYEENTEMNFNEILYGVAYYDEYMPYDRIETDFKMIRDAGMNVIRIAESTWSTWEPEEGVFDFTHLHRMLDCAAKYELKVIVGTPTYAIPSWLAKKYPDILALTHNGKELYGHRQNMDITNPDYLHHAQIIIEKLMEQVKDYDCVIGFQLDNETKPYDTCSKYAQAKFVEYLKNEFPDIDEFNREFGLDYWSNRVDDWDAFPDIRGTINMSLDAEYKKFQRKLVTDFFAWQADIVKKYKRDDQFITHNFDFEWHDYSYGMQPEVNQYEAAKCMDIAGCDIYHPSQSSLSGREITACGNIARGIKGDNYLVLETEAAGNHPWLPYPGQLRLQAISHIANGADMVEYWHWHSIHNAIESYWKGVLSHDLRPNRLYKECSVIGNELKKYGHRLVNLKKTNRFAVIADNASLTGLNEFKLNNESDSNYNTVFRWLCDALYLMNIEYDVIPADPALFASYENILVPALYSATDDVLNALNEFVANGGNMVVTFKSAFSDEHLKIRHDVQPYIINKALGIQYDEFTLPDDVTVTCGGKSSKARDWMEMVDCTTATPVAMYEHTHWGVHAAITENSYGKGRAMYLATLFGEDTLIEALKLFFGEAKNEFDASYPVVIKRGTNMQGEKIIYLLNYSDDEQTVTCHADGLKKLCDDSTVSAGDCITLAPWDFSILYADMNGVNVKSSENKMLSEYAWKNESVAQKLHVQDDKCMKIGYNEKQMSNNITISDVAEALGVSKTTVSRAISGKGRIGAATRKRVLEYIQEHDYKPNVIARGLAQSKTFNICVVMPGDYALVDLPFFQEAIMGIQEIAGMMEYDLLLCIGSGNDMAGLRRIIQNHKVDGVVLLRTMVDDPQVTFLQERRIPFVTAGSCKYKDVKQIDHDHRSACRELTSIMLMRGMKNMALLGGSEDIVVNQTRYAGVVDAHEQFGKKINDNLVFLNLEGKAYIEKAVDDAIDRGCDCLLCMDDAVCAQAMRRLRERHIKVPQQVKVASFYNSSVLENNVPSITSLSFDSKELGARACKNLLRQIEGEETENRTLLPYEVVLKESTQMISYLTSADMSIIAFIGVIFAFALTCIAIAKLNKFLPKDLGRQFAVDGKLSAGKPRGAGIIFIFTFVISAVLFSQINAEIAIYLVLIVIEMLTGYFDDAAEKPWGEYLKGALDFAVAIVVAVVYLHFNSSTITFAIFGGSVNIPPVVFGILTVILVWVSINVTNCSDGVDGLSGTLTIITIMTFFVLDSVLKIADSFNYCILLFAVCLLGYLWYNATPSKLLMGDAGSRAMGIFIAICALKSQSPFIYILAGLVLIIDGGLGLVKVSLLRFLKIHILKNTTTPIHDHVRKKLGWSNAQVVFRFAIIQIVVSLATVYLAMIMAQKGDLMTARPDIRVLDATIRDGGLVNNFMFTDDFINALYRANVKAGIDYMEFGYKASKELFDVNKFGKWKFCDEAAIREIVGDNNSDMKISVMADVGRCDYKKDILPREDSVIDMVRVATYVHQMPAAIEMIEDAKSKGYEVTCNIMAISNTQESDLDQALDMVAKSSADGIYIVDSYGALYPEQIRRTADKYTEIAEANGKFVGMHAHNNQQLAFANTIEAAAQGVSLLDATMMGMGRGAGNCAMELLLSFLKNPKYNVFPVLKFVEEHMLPLKESGAVWGYDIPYLLTGRLNQHPSAAIDYIKSGETHYADFYTDLLDKMINNYEHYITKNIKAFYKRRLFSPIVYIILLTVLWFAFSLGDILSPIHIDDSVSFEAAYKDSDRYVKTTLKKLYFTGYTMKDGNDIKGYYYYCMRDEHCSIVLLAPSTCEEGLPSIDKLTVVGKIVKGKGTYTQFVNKLSKDLSWDSKGLSDTITGCYLNEPEYHLKTTIFMFVFYFGTLIYAVISLIFYILCIRFPVLAPACQNLVVFGNPHKLLAEAEEELATLPQLATEDMFITEHYFIMTSPYGNAIVPIKEILWIYKYSTLHKILWYHFSISYTLHISANKHLYIHCPKNTKSDIDGIIDYLAEANHDILVGFSEENRLKVQAIQGKPLNVERLLAWKKKKMVFVPYINLDFEAFNCYYMIKGSKGIIDACLHAIRCIPMEAYTSFARVYDMFMDNVPYEVWGRYIVEKLRANGIDSGYVVDLGCGTGKLTTLLADAGYDMIGIDNSFDMLDMALEREDDRILYLMQDMREFEPGEKVSAVVSACDSINYILEPEDLQAVFFCVSESLKEGGIFIFDINTPYKYEVLMADNTIAENRDEGSFIWDNYYDADEKINEYDLTLFIKEQSEDEDDIYKKFEETHFQRCYEISELKELLEQSGLVFDAVYDAYTDDQVKCDSEKVTVIAHKAMSDYIVRATAADANIRAFAVTSREMVETAREDHMTTPVMTAALGRLLSAGAMMGAMMKGDKDIITLQIQCSGPAKGLTVTADSHGNVKGFAINPQVELPLNAAGKLDVGGALDLGILTVIKDMGLKEPYSGQCELKTGEIAEDLTYYFATSEQIPSAVGLGVLVDKDQSVKQAGGFIIQLMPFTPDEVVDRLEKKITEIDSVTQMLDRGLTPEQILEEILGDFGLEITDTTETRFHCDCSKERVSRALSTLSKKDLDSIIADGESIEVKCQFCNKAYEFTVDELKEMRMKDGYIKVAAATPKVKVADTVYNGQLIKALMKECTDNGAKVVVFPELCITGYTCQDLFWQDKLIAAAEDELIGIADYSRSLDGIFFIGLPYEINGMLYNMVAVVSRGEVLAMVPKTFLPNYNEFYEARHFASGENLSTYVTLKNGRQVSVDTDFIFSCKQLPKLKIAVELCEDLWTPNPPSIRHAMSGATVIVNLSASDEVTGKAIYRRELVSGQSARLICGYIYASAGDGESTQDVVYSGHNLICENGNVLAESKRFTNETIYSEFDVERIETERRRMTTFVVEDDHRWAEFDLEVKDTTLSRYVNPAPFVPADKTDRDRRCDEILMIQAMGLKKRLEHTNCKTAVIGISGGLDSTLALLVTVRAFDLLGKDHKDIAAVTMPGFGTTDRTYDNAVNLIKCLGATFIEVDIKDAVNIHFRDIGQNPSVHDVTYENGQARERTQILMDIANKENGMVIGTGDLSELALGWATYNGDHMSMYAVNASVPKTLVRHLVKYYADTCGSDLLESTLLDVLDTPVSPELLPPENGKISQKTEDLVGPYELHDFFLYNMLRCGYAPAKVYRLARIAFEGKYDDEFILKWLKNFYRRFFAQQFKRSCLPDGPKVGTVAVSPRGDLRMPSDACGRIWMDEVDKLMGKTHKKTDRRQESIERARHSDRRMKIGAIVLCAAIAIITFVAVGMQLLVPVTEAAVSADNKTRSGNVDVQKNNNSLTASKMDSGKKQNSSEADVNAAEESSEPDKETKLDEILQSAEYPVQLKELAKKNDEAIDFIYEYPEEHSKKHDIDLTAEASQDTVPLLQQWDKRWGYEKYSGNYFAASGCGPTALSMVVLYLTHDAQASPLAVAEYAKEAGYSVDGSGSAWDLMSKGCRHYGVNAKTIKEDEDTFKERLDEGNLIVVNVGPGDFTDNGHFMVITGYDDEGFTINDPNSIIKSNTHWQFERLSSQIRAAWRMFVMSKLTIPKNYSSALNLHDTQLAIKTVKDFFQGMLAQRLSLTRVSAPLFVDPTTGLNDNLNGYERPVTFGILEQGDKEAEVVHSLAKWKRYALKKYGFSLGEGIYTDMNAIRRDEETDNIHSIFVDQWDWEKVIRKEDRNLDFLEETVKTVYKCLRKTEQYMAIQYDYIDLILPKDITFVTTSELEEMFPDNTPKEREYYFAKAKGAICVMQIGDKLANGEPHDGRAPDYDDWTLNADIIVYYPVLDIALELSSMGIRVDEKSLKEQLDKAGCPERAKLPFQKAILNKELPYTIGGGIGQSRICMFFLRKAHIGEVQSSLWPEETIKECEEHGIQLLMRKRDMTFASAVLEAIDAILALAYIGLQIYYGVCYHIQVFKFVANILVLLLVYIAITWLQHYPEKLNHIAAELCVGNIRKYSLRLLTFVKLVFTAGLLVPCVCDAFGIAIRDVYSLIMIGLILVVSAYYEYRIFQEIKSLRKMQLSIEEVKKLDSNSYQIIDIRSEEEVAHGAIKGALNIQAEEIESDERVPHDKKLVIVCSRGKTSVDVAEYLTEKGFDAASLKGGYISWLLDAMKEDEVAERDIKADVEQSIRKKFKKSIWRKFTKAINTYELVKPGDKIAVCISGGKDSMLMAKLFQELKHHNKFDFDVKFLVMDPGYNEANRHVIEENCRNLGIPATIFESDIFDAVYDIEKSPCYLCARMRRGHLYAFAKELGCNKIALGHHYDDVIETILMGMLYGAQVQTMMPKLHSTNFEGMELIRPLYLVREDDIKAWRDYNGLHFIQCACKFTDTCTTCNNEENRSKRVEIKQLIANLKKVNPFVEANIFKSVENVNLATVVAYKKDGIKHSFLDHYDEMADIMDYIDWRGDIGFDEVHVNEVDGLIFSQLIYVQMKPYMPDAKKSYLTIKQLSSLYCADHSDDEIEQMPNLFRHSARLLQKLAHSRRYADCILRYYIYDISEKEESQFSAVTIELPDGTYFISYSGTDHSVIGWKENFNLSYLDETPGQNKAKKYLKQVAAYICNDENINNKSINTRKLWIGGHSKGGNLAVFAAMHVDKEVQDVIIKVFNFDGPGFNHKMIYTAGYKRIFDRIETFLPQSSIVGLLLEHVDDYEVVRSRNSGPLQHDAFSWEIMGGSIIKADGLDKNSVRLDKTLRNWIGSMDEAQRKQFVNVLFSIASDSNFENLDQMSFKQLIEMIKAADDLSKADWSMLKDTVRLLISAGVGVVRDEKEKMLNQFSRTQLLLGKEAMDRLKGARVAVFGIGGVGGYVCEALVRSGVGAIDLIDDDKVCLTNLNRQIIATRKTIGKYKTDVMEERIHDINPDVSVVTHRCFFLPENADKFPFEEYDYIVDAVDTVTAKIALVMKAQEKNVPIISSMGAGNKLDASAFKVADIYKTSMCPLAKVMRRELKKRGVKKLKVVYSEEKPTRPIEDMSISCRTNCICPPGAEHKCTERRDIPGSLAFVPSVAGLIIAGEVVQDIAFDRVMPVFDFSDTPVANEHPECTYETFHSTETKASADKPIVVIDNKQKEWAHHELGMFTNPIKRTSFEFENGDGVTSADILRIDSRFVSLFKWLGENHIKVQLSGANTPDGYAVYRVREVALGRGTKLSAEDGFLQYMMERLFASTMPEDEPDLDDYEEEGDSMKLTSIQSITDFMTCAGRTLPDNILLWARRNLAVARSSEVSPEERRHAQRALSIMMNIQWKGNYFEAIDPVEARRILDEELYGMESVKQRIIETIIQINRTHTLPAYGLLLCGPAGTGKSQIAYAVARILKLPWTTLDMSSINDAEQLTGSSRIYSNAKPGIIMEAFSQAGESNLVFIINELDKASSKNGNGNPADVLLTLLDNLGFTDNYMECMVPTVGVYPIATANDKSQISAPLMSRFAVIDIPDYTDEEKKVIFQRFALRKVFERMGMKEEECVLTEDGLDAVIKLHENTSGIRDLEQAAEHLAANALYQIEVDKVKQVVFDAEAVFELLGMREFGKSRKLDNVLYDVRGPVVDEAARMEENGTNVLKLNIGNPAPFGFRTPDEVIYDMSRQLTDCEGYSNSKGLFSARKAIMQYAQLKKLPNVTVEDIYTGNGVSELINLSMSALLDNGDEVLVPAPDYPLWTACVTLAGGTAVHYICDEQSEWYPDIEDIKKKITDKTKAIVIINPNNPTGALYPREMLQQIVDVAREHELMIFSDEIYDRLVMDDYEHVSIASLAPDLFCVTFSGLSKSHMIAGYRIGWMVLSGNKALGKDYIEGLNMLSNMRLCSNVPAQSIVQTALGGYQSVGEYIVPGGRIYEQREYVYKALNDIPGISAVKPKAAFYIFPKIDTARFNITNDEQFALDLLREKKILIIHGGGFNWDKPDHFRVVYLPRTEILKDATGKLADFLASYKQKMELLRVEHLSKIYGAGENQVKALDDVSLSVEKGEFVAIVGASGSGKSTLLHLLGGVDRPTSGKVYINGTDIFAMNDDELAIFRRRQVGIIYQFYNLIPILNVEENMAIPMELDGRKVEKAQMDDMLLRLGLIERRTHLPNELSGGQQQRTSIGRALITRPSIVLADEPTGNLDTKASNEIMHLLKTSNRELNQTIIMITHNMELAKAADRTIMIEDGKIRMNLMKTLTLKNLKLNRKRTIVTIVGIILATALLSALVTLVSSFQYSMIEYQKQKGGDFHVKFSNVKMSELSEFKNNRNIESTFETMGMGFAKLDGCKNEDKPYAYVMATDEAGFERGCFKLIEGRMAKNEDEIVIPRHLKTNGRIDIKVGDEITLDVGKRYDSNTESVISENCAYEHEAETLTDTVTKHYKVVGIMERPGYGMEDYSAAGYTFVTYSDELAAIDNGTKSEASEADTTLTVYSRYTQKALRNKDAVTADIIGVDDKLFEKANNSSVEMSSEESDRFLKEMENAKYDIYMNGYLINYECVFPIDGSFKALFTVAAVVALIIILTSVYCIKNSFNISITEKIRQYGMLASVGATRRQIKSSVKTEAAMLGVVGIPVGTMSGILASLILVKVVNALSAGWLNVALSFHTSLPALILAVILSIATIYFSATGSARRAAKVTPLEAIRNTKEIKIKSAKLKTPAIIGRIWGIGGVISYKNIKRNNKKYRTTVTSIVICSVTFIVISYFMSMAFSVVGMSYASADYNIGINMSCKKNIDIEKFSKLLSGIEGAEDYLVGAGYDFDVSKPEYTKEYGEYCRQLYDDGEDVSQMFLITVLDDKSYDKYASDAGIKNAAAGAILVNKCTFDVYNENSSKYVKKEMELYKYKAGDTIECGYNVYDDASSDDNAAEGDTESSTDDNNAVEGDTESGTEDNSGYVDEETINNGVRKTVDVTIAGVTDKVPIGYKGYSNTLLFMNQKGFESLWGDGKNGNEIKPGYASYLAYVVAENADEYQDTFEKETEGNPEYSQISFYVSNLDKQMRDEKSLFTLLGVFAYGLIVVIALIGITNIINTLSTGMELRSREFATLRSIGMTDKQFVGMVRLESVFISVKALAIGVPLGILISYLLCVMMNRMDDAIIYEPPYKAIILCILVVIMLIYAIMKLSMTKLRHNNIIETIKNENLMKKILLIEDNKGITEGLCDTFTEPEYELLTAGNLKEAGALLSEHPGLVLLDVSLPDGNGFDFYSERLEKGKTPVIFLTARDEENDIVKGLELGAEDYITKPFSVRELVARVNRVFLRRKNDDSSSVIHAGSISYDLDKKEARRAGQVIALSSLENRILDLLFTNHDKAVSRNAVLDCIWEATGNDVYDHTVTVYMKRIRAKLGEDVIKTVKGIGYRVDSDEALMRKKKYNLENRKHFVYFAIIYTCICVTVMAFTVFFQYRAYTKNYNATVAKLCALIHEKYPDVSDGSIAGILNDSSFDSDYTNLKSAEPLFKKYGIDMEKDSAVLSNEKALKGALWLDIFLVVLFAGGFCLYIVLIRFSFKRQVRQAADYLRRINQGDYRLVMADSTEGELSILKGELYKTAIYLRESAENAKADKLLLKDALSDISHQLKTPLTSLSINLENLEGNPDMASENRNRIMRRAKRDVDNISHMVQAILKLSRLEADVVEFDEKDTLLSEIVSEAADNVMALCDLRDIRLSIDEGSDKDACIHADAYWQCEAITNIVKNAVEHAESEVKIGFYRYEMYAEITVQNDGETISDEDKKHIFTRFYSGSGQPADSIGIGLSLAEAIVRHDNGYILVEDCKKDVLNEKNECSGTRFVVRYLMTLKELGIGQSARILTVGGEGALRQHFLDMGVIPKAEVTVIKFAPMGDPMELQVHGYELTLRLDDAAQIEVELIDSRSRKHEGPKKISNTAHPGLGEEGKYHVKGSGNPLPDGEKLTYALVGNQNCGKTTLFNQLTGSNQHVGNFPGVTVDRKDGSIKEHPDTSITDLPGIYSMSPYTSEEIVSRNFVLDNKPKAIINIVDATNIERNLYLTMQLLEMDIPMVIALNMMDEVTANSGSIDVNKIEGLLGVPVVPISAAKNQGVDELVRHAIHIAKYQERPGRQDFCDENDFGGAVHRCIHAVSHLIEDHAKLAGVPIRFAATKIIEGDALILEQLHLDENEKEAIEHLIVQMEKERGLDRSAAIADMRFTFIEKICESTVVKPKESRERIRSERIDRVLTGKYTAIPCFIVIMLAVFYLTFNVIGAGLQWLLEQGIGALTALTDKALTAAGVNEVLHGLVIDGIFQGVGSVLSFLPIIVTLFFFLSLMEDSGYIARVAFFMDKLLRKIGLSGRSIVPMLIGFGCTVPAVMATRTLPSERDRRMTILLTPFMSCSAKLPIYAFFVSAFFPKHGGLVMGGLYFIGIIVGILFAFIYRKTLFRGDAVPFVMELPNYRMPGAKNVCQLLWEKAKDFLQKAFTVILIATMLIWFLQSFDIHFNMVTDSKDSMLAAISSIIVPVFKPLGLGDWRICTSLISGLMAKESVVSTLEILFGGTVTTALTTLSAASLLVFSLLYSPCVAAIASIKRELGAKWAVSVVLLQCAIAWVAAFIVRVIGLLVMMEIKLENESLELTINSFGAELKSITGKETGTQYLWDADEKYWKRSAPVLFPFVGSLKDKKFTVDGTDYPMGQHGFARDMEFELVSQTKDEAWFLLKSNDETLAKYPFEFVLEIGYKLSGSEIKVTWMVTNPAKKDLLFSIGGHPAFMCPIAEQGKQSDYYLKLDTDKAITYGLICDGGLLDKEDNLLKVDVDGYCQIDEHMFDKDALIIENRQASKVSLCTPDKKPYLTVSFDAPLFGLWSPAGMGAPFICIEPWYGRCDRAGFAGELKDREYGNSLAQGEKFEKSYTIEIELMINILMNINNNLRQLLENETKIHLAEIRFLYQKLDRQLRLNGARVPISFGFDTDRLGAYTPGFGQDEEEFHFSLLFIGYCVTKPLSKDDRIDLYKHEYAHYMQYNMDIPDKYNWQPGIHGSAWKYCCSLIGAAPTPYYKAGEGLIKHDYDKVLKKKITDKSIPIRDTYSREQEYHKKKNSTVKFNINDDVNHPKFGKGTIEHIEQLEGSVRLHVRFGEDLKKIDQKWLLQANLKKAGASRHIMIKIAFFDVDGTLLRLGHKELSANTAAALRQLHQNGIILCMATGRGYTGVPHFDGIDFDVLLTFNGSFVTKGNDIIFKNPINEHDKYQIISNLKQMNRAIAISNEHMIVTNGTDPDLEQYFAFGSEKLKIADNFDDISKTDIYQIMCSCQKDEHSQILSGAPHSQITAWWDKAVDIIPLNSGKGNAVAAVLRHYGFSKDEAIAFGDGHNDIEMLEAVGMGVAMGNAKDEVKAKADFVCKSVEDDGIYHYCIENKLIFMVDGQEIQNCSGSQISNESRSNYILGKYQYYRNLYGDQEIMILNLPIVKAAKAKADEIKGSAYALGTAPVITKAYKRRMDKFIVNIIHRPEMVPEYSATVTGQGKEEDIGDKKLITESLDIFKTQQRLAHEAGLKTTIQMTYASLFNDEAVELAKQDHEKYGDEIALSLLGLPCEEFREKYKTKDFCIWMFSMEDKKAIVNDVFEKFHDRFGFYPESTGSYYMDADLINYIKEKYPMVKCAVATCWEEGPKAYHTCNNSWYTLFDGGPWAPWIPSKQNTHAPAANKEEDSGIVAIPHLSRDLIACYDGNGSNFGTHPQNVLRGMIYDTKTWEYPYLYNLIDQYRDLAKYNNGYSYNMMFVGPGWMNKMGRWEQPYELLLKSYTDGCNYYGKLKKEGKLIDMTMSEFADYFREKKGVNAGNYNEPECAPWRDILYGSDKQLFWYCDPYMRACVNMDQGGAIVDLRPYVAKLEWPVGIGTKHVQDASYPFLIQEKYRAGYFTHYAGAGTVRSAKLSHNGEEVDLCLCPTHSHFSEEVIDGKKTRILTLDPVDIEFYDVKLTLQTKEYFEEGSSNIKIERNILSMSDPNAEVYLDEYITACYGTTEYPEDMTGITLTCEGENPQSINYEYKCRDAKLDGATAVSAVIPAIQTKVSLTPSAKAEGYIEEGYAFSPMFKLGYKKQIKDKEVFATWLNLEKANMAQLGKGKLNYRCPLCFMRDLDIDMFYNKETGIYSCIRCQFRGTEEEVLQGNEDVRKKYKAMYKRFDKFDFDMAKRKKDTMEFRFYELPQGESALVLCGESWKRVYGHEEFHLHFHNLLEIGICREGDGNMYLDEDIYQYHDGDITFIPENFPHVTVSYGEVVNFWEYIFIDIHSVIEEMFPNNAAFQNEAVTTISKKAFMTNVYQSPAMAEYINAIIRETSEHKIYCQRTIKLLVQGIVIELLRMYDELPEEDNNIVKGTNMSQIATALDYMNKHYSESIKAGELSALCNMSETHFRRLFESYINMPPMEYLNLIRVQKACELMKKTNEPMELIAQKCGFTTQSTFNRNFRKFLDTSPYQWKINPENYEHKLLNFRISALKGWMKKKVVSLLLVTTMVASLAAGCGDSSSSGDGTEKTGKKVETVDDGHTLTAWAWDTSFNIPALKAAAEDYKKNVDPDFVLNIEEQSGSSDIETAITTAGSAGDYSTLPDIVLFQDHYFQQYHTNYPDAWVSANDADVKWDDFSQEKLSFSTIDGEHFGFPVDNGTVIFAYRTDLLEQAGYTIDDMTGISWKDFIEVGKKVYEKTGKYLLCMDGDGNDLFYMMLQAEGESQFKDGKPNFVDNAKLKEIMQVLKDMIDNNVLYLANNWSDYTDQVIQGDMVAGVMNGNWIIPTIEKVTDNSGKWEITSLPTLEGGEGYASNGGSSLYITSNCKQTDLAKKFLAYTFGGGSYTDKGVSETYDNALKNGGVITTYTPAGKSEVYNEGVEYFNNQPIYAKIVEMGANVKTIEQSDFHYDARKKLATALINITQNGADIDSEIKTAEDDLKFTMGLMKNKKKGMSITGKQRVAGWIYLAPATILIFIMSFWPIIQAVITSFKTGSSANMQWANPLTYNYTRMFQDAVFKRSIGNTFLYLIIEVPIMLVLAILLAQLLNNKHLKFKGLFRTCVFLPCATSLVSYALIFKSLFATQGLINTILVKLGILENNFNFLGTGWSAKIIIIVALIWRWTGYNMVFFLAGLQNIEYSVYEAAKIDGASGWKTFWSITVPLLRPTIVMTTIMSINGTLQLFDESVNLTKGGPANATITMSHYIYNGSFGEGVANFGYASAMSVIVFIMVAILAFINLKVGDKRDMTKKKHGSSIQKRLIPSYIFLVIVSFISVFPFFWMISAATNKSIDVARGRIAFGGYAIENLKKLFTSQNVALGMKNSLINATVQTIIALLVCSLAGYGFELYHDKAKDKLFSVLLLAMMIPQVATLIPLFKMMSKLGFINTVWGFMLPAISTPFLIMMFRQNSRNFPIDIMEAARIDGLSEIGIFFKMYMPVQKSTYAAAAVITFMNAWNSYLWPKVILNKPAAITMPMLIANLAAGYTVDYGVLMMGVLFCSIPTMLVFFVLQKQFAEGITGSVKMSDFDSNIIKNPEIFEQNRLAAHSDHVCYKNELEKIKGKSSLRYDMNGLWKFAYAKNQSLAPCGFEAADYDCKGWDEIRVPAHIQMEGYDVPIYTNTTYPWEADESIKPGEVPEIFNPIASYVKYFTIPENMKNKRVCISFQGVESGFALWLNGHYVGYSEDTFDPSDFELTDYIIEGENKLAVRVWKWTSSSWCEDQDFYRFSGIFRDVFLYAVPCAHVEDLSVVPTLNDTFDEGTLSVSIKADGDGIASVKLYELGDLSVEKYDRAKLLLEEFDIELRNKEICEGSCNVKNPLLWSAEKPNLYEVKIIVKDTHGNETEFISQLAGFRQFEMVDGLMKLNGKRIVFKGVNRHEFSSITGRVPNRDEVIKDIVTMKKNNINAIRTSHYPDDSMLYKLCDIYGIYMIAENNLESHGTWEAYNKGYVDLDFVVPKDKPQWREMMLDRANSCYQRDKNHPAILIWSCGNESFGGKTIYEMSQLFRQLDKHRLVHYEGVFNDRSYNDTSDMESQMYTPAAGIEKFLAEHPEKPFICCEYTHAMGNSCGAMHKYTELTDREPRYQGGFIWDYIDQSIYKKDRYGKWFLTYGGDFGDRPTDGDFSGNGICYGGEREASPKMQEVKFNYQNISVDFDSDYIFTVTNKNLFVNTSVFDAFAILLADGEEVYRTKLQISVPPMDRASYEVPVTLKNSMIDAEKEYCIVISFVLKENTIWEKAGYEIAFGQHMIKKPVSEYSCDKSVELVVGNGNILVRGENFKALFSRMNLGMVSYVYGGVEMLPNTIPLPNFWRTPTNNDSGNMMPQRYAQWKIASMYVTTRQNQRFADTSPRVEKNDNNIAITYTYFMPTTPQSSCEVTYRVFGDGTIETTLSYDPVKELGDMPEFGMMFKLDADYDTVKWYGLGPQETYEDRQHGGKYGVYENKVADNVAEYLVPQESGNKCRVRYAKVMDKKGRGMLFFGDELSFSALPYTPHELENAAHHFELPPVHYTVVRVAKKQMGVGGDDSWGAHTHPEYLLDVSEKMEFTFCFRGIMSKFIKGMDLSTLLELERCGAKYYEDGKVKDILDIMKEHDVDTIRLRLWNDPKSEDGEPYGAGNNDLAETIAIGKKVTDAGFGVLLNFHYSDFWADPGKQIKPKAWKNFGVDELEQAVYDFTLENLTKIIEAGVNVTMIQVGNELSNGLLWPEGKVPNYDNIAKFVNAGIRACRKVNADIPIMIHLDNGGNNELYVRWFTNFIERGEEFEYIGLSYYPFWHGSLDQLEFNMNDIAKRFNKDLIIAEVSMGFTMDSYQEYEKLADSERKGYATKPELVEKIDYPMTIEGQADFTKDFLNRVANVVDDHGKGFFWWEPAWIPVPGSGWATPASLKYMNDPGPCGNEWANQALFDYDGNVLPALDVIKCFKKMIQQNVLDKFKELFGADGDIRVYFAPGRVNLIGEHTDYNGGHVFPCALTIGTYMAARKRDDRKLRFYSMNFDNLGVVESSLDEFTPDPDGLWINYPMGVMWAFEGRGMKLESGLDIVLFGNIPNGSGLSSSASLEVVTGYMLKDIYGFDVTNQDIALIGQYSENNYNGCNCGIMDQFASAMGKKDNAIFLDCNTLDFEYAPIVLDGAKIVVTNSMVKHSLVTSAYNDRRNESAQALKDLQTVCDIKTLGDLTDEEFEAHKDAIKDEVARKRGKHAVYENQRTIKAVKALKENDIETFGKLMNASHVSLRDDYETSCPEVDVLVDEAWKIPGVIGSRITGGGFGGCTVSIVKDEAIDQFKANLTKAYEEKVGKTPEFYVVSIGDGPSRLAMIQERILELVKYGLTTGLVDPADEVYTVNRLLEVLGVDDIEDETFEKVEAQPAWTQEEAEEKLEGILEDMMTYAYDNGIMKENSIVYKDLFDTKLMGCLVNAPSVIRARFKDLYDNESSLAATDYFYKLSCDSNYIRRQRIKRDMKWTTDTEYGTLDVTINLSKPEKDPKAIAAAKNAKQSAYPKCQLCKENEGYAGRVNHPARENHRIIPVTINNSQWFFQYSPYVYYNEHCIVFNSKHTPMKIERATFGKLLDFVTQFPHYFVGSNADLPIVGGSILSHDHFQGGHYTFAMAKAPIEKEITFKGYEDVEAGIVKWPMSVIRIKSADRDKLIDLADKILLAWRGYTDEEAFIFAETDGEPHNTITPIARRRDGDYELDLVLRNNITTEEHPLGVYHPHAHLHHIKKENIGLIEVMGLAVLPARLKGEMAELRDAILTGKDLHSTETLASHADWALKFMSKYDKIDESNIDGIINEEIGLVFKEVLECAGVYKCTDEGRAAFQKFIDAVNLMFKNNSKDLTVGSPTGLILGFSLPLLLGMLFQQVYSLMDTIIVGRFLSVSALAAVGSTGSICFLIIGFCQGVCAGFSLPIAQRFGAKDEKGLKKYVGNAGIVSVIIAIIMTALTVLLCGHILTWMNTPGDIYDLAYQYLIVIFAGIPATILYNLLSGYLRSLGNSVIPVIFLIIAAILNIGLDLLFILVFNMGVFGAAFATVLSQGISGVLCIIYIAKNVPLLHVSRNDLKLDSSYVRNLMVMGLPMGFQYSITAIGGVILQTAVNGLGSIAVASMTAASRISMFMVCPFDALGSTMATYSGQNVGATKFERVKKGLISASVIGSIYSVLIFVALPFIANYLIYLFVSPSETEVVVQAHQFLLINAFFYIPLVLVNTVRFTIQGMGFSGFAMFAGVAEMIARSLIGLVFVPIFGFSAACFASPLAWILADAFLVPAFIHCLHELQKQMRDWENNIRRVVPYTPGEQPKNTCVIKLNTNENPYPPAPGVKEVLSNFNTDDLRLYPDPRVDKLVNAIADFYKIDSSKVFVGVGSDDVLAMIFMTFFNSKKPILFPDITYSFYDVWADMLRIPYEQLPLSDDFSIVPSDYYKANGGVVFPNPNAPTGKLMPLDEIEDIIEHNQDVIVVVDEAYVDFGGESALPFIDKYDNVIVVQTFSKSRSLAGSRVGFAMANPVLIKYLNDVKYSFNSYTMDRITIEAATAAVKDRAYFEETTAKVIKTREWTKKELKRLGFTFCDSKSNFIFAKPANVSATKLFEDLKADNIFVRHFSSPERINDYLRISIGTDEQMHTLIKFLENYSCMLKKYIYIFLISMIPLIELRGAVPVSQVMGLPIVPSFIVCIIANMLPVPIIYLFARKVLIWGADKPIIGRFFSFCIEKGEKGGKKLQAKAGRGLFVALLLFVGIPLPGTGAWTGTLAASILDMDFKSTVAAVMLGVLLAGMIMMIVSLAGVTIFLMKKVGYFFYTFVPLLAVEAIQTIALFFMMGMGVFGQGFVGKLAFPSANVSDRLEKTFTSVNFNMMIMVIYALITIAIFGMWYYARYEGSFLPSPKKTFNPMMIVAIVILVPGTQFAANFIANLTGYIRPDWLQQYNKLFETSGITDTTFITVLYSVILAPICEELIFRGVTMRCARKALPFALANLMQAALFGLFHLNWIQGIYAFALGIVLGYVCERGGSIYYSMGLHLLFNLWGTLSGFFPDPGNSAVVFVIVIAVTIVSLVVGFVLFNKGRRKLPINSTRIMSKNLKTEAVDHLFDAILCLKDRAECYTFFEDVCTVNELFSLSQRFEVAKMLREQKTYLDIAEKTGASTATISRVNRSLNYGNDGYDMVFSRMEDGSDKEDMENDVKEFLSELLKQLKSIDYIKPEDIPNIDLYMDQVTTFMDEQLAASKRYESDKILTKTMINNYAKNNLLPSPDKKKYSKEHVLTLLFIYYFKNILSINDIRSILNPLTEKYFGNDDGFTMQDVYTEVFSLEAEESQKLLKDLGKKYKIAGETFEDFPDEDQKFLHTFSFICMLSFDVYIKKMLIERMIDNLNEEKEASSHENTHSGKESKKTGSNMNLDMLNEQQREAVLTTEGPLLILAGAGSGKTRVLTYRTAYLIDECGVNPYNIMAITFTNKAAGEMRERIDDMVGYGSESIWVSTFHSTCVRILRRYIDRLGYDTNFTIYDADDQKALMKDICKRLEIDTKMYKEKMFLNVISSAKDEMIDPIEFENRFTGDFVKRKQALVYKEYQNALKQNNALDFDDLLVKTVELFKLDKEVLDYYQERFRYIMVDEYQDTNTVQFELIRLLAMKYKNLCVVGDDDQSIYKFRGANIYNILNFEKHFEDAKVIKLEQNYRSTQNILDAANSVISNNVGRKDKRLWTDNGAGDRITFEQLESGFEEADYVARSIARLVRNGEARYKDCAVLYRTNAQSRLFEEKFIAANIPYKIVGGVNFYARKEIKDILAYLKTIDNGHDDLAVKRIINVPKRGIGATSINKVTDYALEKGIDFYTALRYVDEVPGMARSAGKIKPFVMFIQSLRARAEMDSVSQLIQAIIDETGYVDELKAEGTDEAEQRIENIDELINKAVDYEQGEENPTLSGFLEEVALVADIDGLDENSDYVVLMTLHSAKGLEFPNVYLAGMEDGLFPSYMSITSDDATSEIEEERRLAYVGITRAKEHLTITSARMRMVRGETQFNKVSRFVKEIPRELMAGEVYEPKHRDDDLERNSQSTYRKAKEAFKKTPTYGTEYATTFNTQRTRTPVYTPVSNQKSFASANTTGGLSYKVGDRVSHIKFGAGEVMAIVEGGRDYEVTVDFDKAGTKKMFASFAKLKKIDMSKVEELLKDNKLAEKLSMAKLNDLLKKEEEDKKPSKAVIIFAIIGVLVAVAAAAYGIYRFFTPDYLDDFDDEYDDEFDDDFFEDEDDDDAEEEKEAPKTKEEKMKKGFRGTGTVERVDFPNKGIAVTDDGERVIVKNTIPGQKVEFVVNKVKHQRAEGRLMEVIEKSPLETEEPCPHFGMCGGCTYQTVPYEKQLDMKLTQVKKLISDAIGTEEESGYEFIGIHGSPKKSEYRNKMEFSFGDEYKDGPLALGMHKRGSFYDLVTVSDCQIVDEDFRTILKATLDYFSKNNIPYFHRATHKGYLRHLLVRKATKTGEIIVDLVTSTQTEGFNEEELLAGFRYALLTRQYDGRFKGVLHTKNDSVADVVKNEGTEVLYGDSYFYEELLGLKFKITPFSFFQTNSLGAEVLYETAREFILGDDKDSLNGKTVYDLYSGTGTIAQLMAPVCKEVVGVEIVEEAVCAAKENAALNGLDNCKFIAGDVLKVLDEIEEKPDYIILDPPRDGIHPKAIGKIIEYGVENMVYISCKPTSLARDLQIFMARGYRVENICCVDMFPNTYHVETVVGLQRKDTMTNTALRAENSNSRTITFKSKEHEKFYMEYLKKCRYQDVYHQALVYCLGIDRDTRENVNKIYNFKTGCVKTESLQEGWQTSGSLRIVRMAFNLYCNGTPSVGDYEVEEDQLKECQYYTVEDLFCCGYARYFWEAIKIRYPEYCFYKDWEDMYAENMLKIRLQGTLKDIQWFRRILEKHKELDVLEVSDAYANKGTSKYFRVYVEVEEKEMCKVIAIANQKGGVAKTTTTINLGAGLVKSGKKVVLVDADPQGHLTMGLGFPKNLKVTLKSMMENIIMGLEFDPKEAILHHEEGVDLIPSNKLLAGMDMSLFTVEDREKVLKEYLELLKDEYDYILIDCMPSLGMLTLNALSAADSVLIPVQPQYYAADGLMELLKVVKGIHQRFNPDLQIEGILFTMDNCRYNNAKRNKQAIKTTYGSDIRIFEQTIPRTESLAETASEGVSIFAYDGKSKGADSYLELVQEVLKHAMRRPKKDIQLTSYDELLGLEETPEKSMNQVVEIDLAKLYPFKNHPFHVNDDEKMAETVESIKTYGVLTPALVRPRPDGGYEMISGHRRKRGCELCGKTTLPALVRNYTDDEAVIIMVDSNIQRENLLPSEKAHAYKMKYDAMKHQGSKGEKYTADMVGEAAGDSGRTVQRYIRLAALSDALLEYVDNNKIPMIVGEKLSYLKPEEQGWLLEVITNSSIFPTKQQAEQLKECSANGKLNQSYIYAVLLKKESSKINVTIPAKKIGNYFPETYSKEQIEEVIFMLLDKWKENKEGVADAEDTVMQKIQFDYFTGMEAEQYSFYRVPKVLFTEPCFKTLSCEAKVLYGLMLDRMSLSIKNRWLDSEDRVYIIFTVEEIAELMNCGTQKAVKLVKELDSSNGIGLIEKKRLGLGKPNVIYVKNFMIREVPDQKPTGNCADLQSEQEDHKKIADLQSKQKRHEECADLQQEAENKGKTGISLNCENHHSGVVKTTIQDYGESQFQNSENHNSRMVETTNPEFPESQFQNSENHHSRIVEITNPEYPKSQSNNTDINKTDISETEINQSYPIISGNPQKKKDVMEKMRAYCEVIHENIDYQYHAKEDVDELVELMIEVMMMPEDSMIRIAGVEKPVALVKNRFMKLNYSHIEYVLFCLNRNTTKIGNIKAYLLTALYNAPATINSYYQAEVNHDMYGGMKKMIKKVIAPVLVITVLFAVLRTFCIQDGKCNYFLLLLLMGIPFGIGKMCVWMVPRDFDLGGTLAVWTMNFLIGGLIGSVVLLAMIGQAIIYLSVFLLTVITGIHKIPRIKMSNRAISTELIELGERIRKRRQEMKLSQESFAEKAGISVNTVSRIEGGQTAMSVEIFRKMIEILETDANILMGKEGDDAEKRKQFEEVFYRIQKMEWKEQKIIMQTIDSLIDSFNEYRMTRQENLIYRKQCPYDAMGDYSVLMENEKNIKTERNAKKSDRDIRRKIKMLTLQELKQVVGNRKEKRKVPSARYLRENDVAVVKQRLIDGAEIIAYQTGYVFYCVGDYGTVFPLFTCRDYVYEAGRKITVVKEDFFDNQPWYVRLILEGEDRLCRNREVREHNNCISYSHISEGWCELVDKRQNVLEKLIIEEAIGEFMDLLTDRQRQVIHQIYFQQRTQREVSRVFGITEPAVSKCISQAKQKMRRNAGRLIGVLQKGEMRGKKPKERQRYVLRVNETLIEVTRDVYLAWYQSRRKERYQLEKMQKNGVCGIEKVGETSYNSYLHILSPEEIVIRVSEIQELQEALKYLSEEEMELIRLLFFEEYTVKKTAQYFGCCTKTIRNRKNKVLQKLKDRLETLMKMRFKRFLSGFMAVATLASVIVQPVTVSASELEPEPTSFEQQYPELQDVQDTLDKDEIVEAKDIEIPYGEEFEVEVDLSGIEGVNEKKVKVLFHEAKSEAGTDFDAHTPDTYKAVYAVEPVSGHPAYRVSRNITVKEPETEEQTKSSSENTVGEGNAGETEDSGNAEEDADSDRAKEIVTDLTDGQEVTTDEESGLTVSEVMDQAENEGIDLYEMEPGETVTFMAAAGNARSSQQVSVTRGAEYRYADYGYGTYLTYQYTVKFGNVSATAYCVQPSKPGPGTGTYTINKVGDGKALAKVCYYGTKASGDDGFFTEENGYGNLSAGARFILVHLAASYANGSSDAFSGANTTAQNLAKKLYNYCISQPDIPDVAMSFSDADVTAYVDGNSQRTKEITFKADELQSITMKLPSGVKLHNVTTGKTSKAGEAVEISGGTKFYLSAPLTQVQDVAGNWSATMKGSVTKDYSAYKISTGSGSQDLALVFGEGVDDEKYVDFKVTWVQHASVKVIKKDAKADAKLSGAVFGLYSDANCTKLITKLPATDANGESSVQIIKTQDTVYLKEITAPTGYRINATAYNVKLEVSKTTTVTVPDEEQMGQLTVYKEGQVLTGADVTENGTTFKYEKRRQKGAIYDVYAGADIKTAYGAKVYSKGDLVKENLTTDSNGAVILKNLHLGTYIIKEKQAPTGFYNAGEEKSVTLSYAGQNVDVVFSETTFTNDRQKAEVVVTKQDKDTENPLDGGIFGLYAASDIKNADGTVVVKKGTLIEKVTTGNDGTAKFTADLPLGFSYDVKEVQAPEGYLRNADDVYTFAFSYTNDKEAKLTFKHTFKNERVTAKISLQKQDKETKKAVPQGDATLEKAVYGLYAREDIVHPDGATGVIYKAGEQVATLTTDKNGQASVDGLYLGNYYVKEITPPTGYLADEEEHDLVCNYEGDLVAEVKRDCLSLEQVMKQPFEIIKAANNGKTDADLLKGAGFTAYLVSSLTVKEDGSYDFDSAKPVVIGENGATEIFTDEKGYARSIAIPYGTYIVRETTTPHNYTPVNDFIVQITENHPTTPQVWRVLLDKEFEAKLKIIKQDDETKKAVLQKNTEFKIFNLDTEKYVEQVTTYPTTVKHKSYFTDEQGYLILPQNLKIGHYRIEEVNAPYGYTLNENYYEVDVDSNTAYQMDGTSGDVIIEIAYENHPVKGELNIVKQGEVLNSYKDDFTYQKETLEGAVFEVYAAEDIYTADFQKDDNGNRILEYASGELVGTVTTDKDGKAQITDLPLGTYKIVEKTAPEGFVLNEEVQTVTFEYKDQKTPVIEQTATFENDRQKVEVFVVKQDAETETVVAGAEFGIYAKEDILAHQEVIVKADTLLGKAVSGEDGKAVFDVDLPFSTYYIKELAAPAGYVSSFETLEVTAKYQGQDVKVVELESVFKNQPTKVTFTKSDITTGVELSGATLTVLDKDGNVVDTWKSVKGEEHLIERLTAGETYTLREEMAPYGYLMAEEVSFTVDDTAEIQKVEMKDAVPTGTLIINKKGEFLKKVSALDSIGGWMKHLFEYLSGSLKDVTFEVYALEDIKAADGESEDYYKKDALVATITTDETGMAKLTDLPLGKYYVKEKETASGYVLDGETREVDLTYRDQNTAVVTYSADWQNKRQRAEVNVLKKEKDSDRVLEGAVFALCNKEDIVNAKGDVILKADTVIEEQATDKEGKLTFTADLPLGYTYYVKETSPAPGFATIDQVQEFTFEYGGADKETLSYAFTFEDEPTTVEFTKTSLTDGKEIEGAKLKVTDESGKTVDEWTSGKEPHIIKELTAGKKYTMTETLPADGYVTAESITFTVEDTSEVQKVEMKDDVTKVQISKTDISGKELPGAKLTILDKDGKTVESWTSEEKPHYIEMLPIGEYTLREETAPDGYLVAEDVKFTVKDTGEIQKVVMKDEAKPEETPTETPTETPETTPTSETKTTEETKKSTAPKTGDNTPILFWILLAGAGMAGLGGTVILRKKKKMTKTVLIVAAAAVFLVYGFVLWCCIKVGAESEKEYMKLAEKRGKEQQCDKMQDEVNEKTVSLCIRCGKVTANLLKAAMVKALAKMEQEKKQQGQKTNQKQPQKEKEDKTYKGKQSLDKLMKQNVQLSNIEITDGNIKSFERVAKKYSIDFSLKKDVTADPPRYYVFFKARDADVMTAAFKEYTGKSLNKDKKPSVRKKLQQAITKSLAKHRELEKTKGKEKEPSLMSRLQKLLGVGKGYLERLPPVDVHKLLRIVLMNLPYIVIFYVGNKLAWLYQYCVGDSMIERLMVLILNFQMAFSRILPSMHKNELLVGITGAVAVKLMVYMKGKNAKKFRQGVEYGSARWGTAKDIAPFIDPVFENNILLTMTERLTMNGRPKNPKFARNKNVIVIGGSGSGKTRFYVKPNLMQMGKYISYVVTDPKGTIIIECGKMLVRHGYKVKVLNTINFSKSMHYNRATCSLLKRWRTALFQSVLMPGVYKIPMVRMTEMSDETPECKGLKVPRSEMGVWVKAQAVRFSRNGCYETPWHVTGVSKLSGPEGTPKGMYVQIGLSEQGKAGSLLDNPAKDNKRMNSCMAQKAKKKSKLRHAEYYDMQKTFDSLYADSKSGEVFGHLMDIISAPNNIKLAFRNIKGNDGSHTAGTDGRTIESLAVMSEDKFVKLIQKQFRRYEPKAVKRVEIPKPNGKMRPLGIPCIIDRIVQQCILQVMEPICEAKFYEHSYGFRPCRSAENAISYAYGLAQRNKLHYVVDVDVKGFFDNVDHRKLLKQIWTLGIRDTKLIQIIKAMLKAPIEMPDGENVLPSKGTPQGGILSPLLANIVLNELDWWIASQWDEMVRHMKHPCKVTYYPNGAEKKCNSYTALKKSNLKEMRIVRYADDFKIFCRTKEDAEKTYYAVKDWLWKRLKLEVSDEKSKVTNLRKRDSEFLGFRIKLRRKSNSWVITSNVCDKAIHRIGKEMADSVKAIQSSKTAEEISLNVGDYNAKVIGVQDYYCIATRVNLNFSDIARPINGQLLHRIDGIKKQGEIKNRYLRKRYGKSKQMRWIGETPLVPLAYVQFKIPMRKSRKINPYTPEGRAEIHDNLRIDVNSMLWLMRHPIPTESVRYNDNRVSLYAGQDGKCAITGKKLDVQTCICYRKTNNCKKGNDSYQNLLLLSLQGLAIVSSEDMMSVAALVKEYSLNAKVITKVNKLRATAGLPLLAAKMGENPEIISKGYLSLSFHYIHSEKDILKLVNTIMVNTKGEGEKSSEDFWTKAERLLYCALIGYIWYEAPEEEQNFATLLEFINASETREDDETFKNAVDMLFEELEKEEPEHFAVRQYKKYKLAAGVVCSKRLLNQAVGKSLRTHNLKPKKGAQVMRKNEKITALYERLSRDDFGKDDDQQRESNSISNQKAMLEEFAARQGFTNIVHFTDDGISGTCFDRPGFLAMMKEVEAGNVEYLCIKDMSRMGRDYLKVGQIMEILRQRGVRLIAINDGVDSARGDDDFTPFRNIMNEYYARDTSRKIRSTFQSKGKSGKHLTGTVIYGYLWNEARDQWLVDPEAADVVKRIFAMTIDGYGPYQVASKLKEEKILIPSAYLAQHGEGVNKNKTFKDVYGWGSSTICNLLEKREYLGHTVNFKTRKHFKDKKSHYVPEDEWTIFENTHEPIIDQQTFDLVQKIRGNVRRYPDGWGEAAPLTGLLYCADCGGKMYVHRTNNGKRISQYTCSQYTKVPCGTLCKTQHRINEDVVLSLVSEMLKAIAEYAKHDRAEFVRVVQEAQSSQQTAEVRKQRTRLATAKQRVSELEVLLCKIYEDNILGKLSDSRYATLDAQYEKEQSELTAEISVLEKAIKSYEKHEKDADRFIALIDKYENFDKLTIAMLNEFIEKILVHERDRKGSIQTTQEVEIYFNFVGRFVPPAFGEVELTPEELEEIRKREERKDRLHQNYLKRKASGAQKRYEDKIKKRKKAEIEAKKAAIRAEDIAKGVFVPVSSLPQREPMKGVQTAMNIAYTQNGDYLIPNIVIRKTKPLGHYGRLRKAYLKMHRPILFNELVLSDKLFEHCAEIDEAARNRMELIVRSLAEQNGVTEQLKAENQMEWVRQMNACKAQAEEVVKAELIYNMKKKSYWLSISVFVLILIWTVYYYAMQYTGGFADLKDSIVCGIAGLICIVFIVKRTIDFLKNKKSMKKKLPIILLGVILACVLVFGFLYANNDIGKTANSLEADIRQSQKISDDWIVDGSISDTMAAFISYPQDKTDHTFSVYVNRPGLSFGYFFRGGGDIVEVDDYIAEFVVEGNNERAFISMNTQNIVRLEVDDGNGIQVIDIDSGKPFAIVLPLNVGNICFYDTNGNVVEYLRQQLMAKPKNLEQLRAEKEQVETQLAQEQHKLERLENRKKYLEKGERQKRTHRLCNLGGTIESLAPEFKDLTRTEMTELMEYIFSLPEVQRAVRHMAITHINQASRGKEQKADGTISSERHADMALFHLSVTQTKRSAGQSAIASAAYRAGERLYSEYYGEYSDYTRKGGVICSDILLPSHAPKEYADRQTLWNAVEKAERGKTAQLAYSFEISLQNEFSLEENIALARKFLLEQFVSRGMVVDFAVHQPDREDGGIPNPHFHVLCPIRPIEQNGKWGLKQRRVYELDEDGNRIRDADGKFVFNAVPTTDWGSPETLEYWRQTWAELCNAKFAEKGIDVRIDHRSYERQGVDLLPTIHEGATVRAMEKKGIRTEKGEFNRWIRATNAVIRDIKKKITLLFDWIAEAKAELAKPQAPDLVSLLNAYYTQRRAGAYSQKGKVSNLKEMNETFNYLRANSIYTLEDLESRVSEHSAATESLKKTLDEQTARMKAIKRLYDSSAAFQSLKPVYDGLQKIKFEKPRAKYKAEHEAELIQFYAARRKLTGEFPDGKVDMKKLSDEYDELEQAHETTYGEFKAVRDDLHRLWKVKSCVDTAARFNERTEEQKLQNRPQTRQKKEELSRMNYTQAQIDRANAVSLEDFLRTQGETLIKSGREYRWKEHDSLTVRGNKWFRHSQSKGGYPIDFVMEFYGKSFPEAVQLLTGESGEGQSEATTAPPTAFHLPLHNRTADRAIQYLCESRGLNKTLVEDFLLSGDIYEDAKRHNVVFVGRDRSGTPRYAHVRGTADPFRQDIAGADKSYPFRYEGNGNQLFVFEAPIDLLSFICLYPQDWQSRSYLALGGVSGKALDRFLSERKDTRKVFLCLDSDTAGSEACTRLAQSIPSEIAVIRLVPARKDWNDVLRQQGDIPSRKFIAETITLRELPTAQPVPMLRMADVELTSVDWLWFPYIPFGKLTIIQGNPGEGKTYFAMRLAAACTNRKPLPGMETLEPFNIIYQTAEDGLGDTVKPRLMEAEADLERVLVIDDRDTPLTLADERIARAIRENNARLVIIDPVQAFLGADVDMNRANEVRPIFRSLGDIAQATGCAIVLIGHLNKAAGTQSTYRGLGSIDITAAVRSLLFIGKLKDSPTTRVLIHEKSSLAPPGQSLAFSLGDEKGFEWIGAYDITADELLAGTDTAKTESKTAQAQMLILELLANGKRMPSAELEKAVNERGISSRTMRTAKSRIGDRLVTEKDGTAWVCYLRDMNNTATNTATCPTVRKQIGKTTYIVRVHFSETAKETMEDKIKRLLREEVRKMMISCGARLAPFDIAELREIMSYDEMELDMVGDQRTTLFIIISDTDDTFNFVVAMMYSQLFNLLCDRADDVHHGRLPYHVRILCDEFANIGQIPKFDKLIATIRSREISASIILQSQSQLKTIYKDAAETILGNCDTMLFLGGKESSTLKEISETLGKETIDLYNTSDTRGQSRSYGMNYQKTGKELMSRDELAVMDGSKCILQLRGVRPFFSDKFDITKHKRYKELSDYDKKNEFDVEAYMRHRMEVKLTRTQEFDLYEFSEERLAEELNTENKEAEHVKDSDTMAFFNQAINILQTLVVAIGAGLAVWGVINLLEGYGNDNRATRSMPVLTSKQQEQKSKQRKIRNSEYYDMISTFDGLYADSKKDKIFNHLMEIIESEENIKLAYRTIKTNTGSDTAGVDKRTINDLAKLNEEEYVRLIRKQFSCYHPRPVKRVEIPKPNGKTRPLGISTIVDRVVQQCILQVMEPICEAKFSDNSYGFRPNRSAEHAIAQCMRLIQVQHMYHVVDLDIKGFFDNINHTKLIRQIWALGIRDKKLLCIIKEMLKASVILPNGDKTFPIKGTPQGGILSPLLANIVLNELDWWITSQWEEMPTKTDFTTRSNKQGTVIKSHAYRALRRSRLKEVHAVRYADDFKIFCPTHAEAVRAYKATEMWLKDRLGLDISPDKSKVVNLKRQYSDFLGFKLKVRKKGKKYVVRSHMCDKAYKKAHEKLTKEVKTLAHSPDDTAQFIQLQKYNSVVAGLHEYYCIATETTADFGKLAFSINKQLRNRLKGDVSRKGSLKNGFIKDKYGKSRQLRFLHERPIVPVGAVPQKNAQNKRKNINKYTVKGRELIHKNLTISTDAMLWLMRNPVKGRSIEYADNRISLFAAQYGKCAVTGLPMEVHDIHCHHKMPLSKGGTDAYENLILVSKAIHVIIHASSEITIREYLNPLQLDDSKLAKLNKLRTMAEMPVIILMRKEDLRLAAGLTTNMIANMGKGKNISMETLVRICEALNCGIMNVIKLEQDNIMKKFSKRLFTSLVAFCMLFSVSAVPAFAAETTTEITDTQQPVVIGEYDGYLTDVMISDGVTKRAVANVRINSYATYDEDDGIQVHVKLYVPWYESPKPEFTGMTGTVNVLMNKKSTNTAFAELADGEETIETDVDTGRTGNSGDKGTVSVSGVATANNALAGGGAFAISYPVTLPMLFSGSVHDDIPVLDLTLSFEEKSFILTDNTHKQEWTGTYSLEKIDNSSSKLGLTFENLEEPVTGVYGTRVYSDDSESATITLQTDENILSFVGEDSMKTRISVQERLKDLRVERGLNLEELAQETGISKSALGSYENDNDEYKEINHGSLLKLADFYQVSVDYLLGLTNNRRYENTPIEELHLSDEVVELLKSERFNNRLLCEIISHEKFKELLADAEIYVDGIATMHFHDTNSSLAALRAMVLEEHPEAAADRAIKVLEACQIEEEDFFCHVTHKTWDVILHDIRKAHENDSESAPDTTPADELIREVQKAMQSPGDRVQQFTEIFCKAFRLKYKRLSQEERSLLKKLFKKSPLIKQSGMNFRRRPWKMEFEFMSADTVLPPCMPLPAAMLRLPISSTAKVMYARLLNTTLTAGIEDSNGILFVRFPIMELAAALSRSPVTVKRSLKELEDIGLILRVRRGVGEPNRIYTLLPKGGLPMINEKLEKLNQEIAKGEARLRRAQHEEKILEHQVKQLTRKERTHRLCTRGAMLESFLLRPEVLTDEDVMDILKQAFSQSGMKEIVAESVKGRVAGESLTEMAYELENIVREWMDHLKGLNVEVKKMFGCYCLYCDGQAVGWIHNSVMSLREVGLDYLPKDIKRPTKEDKIQELVIPLDYANADWLPKAVQDTAAIRKRNGMGWWFATSFWAKEKQETVSDFLLGGAASGRRVFIFRWFISQTKMLCPHHDIKIVQRSNRQSAVAAAAYQSGERLFSEYDQKQKYYAEKRGIVHTEIMLPPHAPPEYADRNTLWNAAEAVEKQWNSQLARRIVLAIPREIPRSQHAGLIRDYCREFFVSKGMIADFAIHDKGDGNPHAHILLTIRAMDETGKWLPKSRKVYDLDENGERIRLPSGNWKSHKEDTVDWNDQKYGEIWRQGWAATANRYLEANDRPERLDLRSYERQGLDKIPTVHMGPAVSQMEKRGIQTNIGNLNRDITAANRLMQSIRQMVRHLKGWIADLKEKKATLLEALQEAKEPTLPELLGQYLDLRREERTGWTSKGQLKGTVNDFNKVMVAIRYLREKELSTVESLDAYLDTVSGQAVSIRAEMKPKEKRMKEVDTMLSHIANFEAHKPVHAEYAAIRFKKPKEQFAAAHRDELDAYNAAVRYFKVHLEGTKYSTKKLNEERTQLAGEVAEYKERLSAVQEDVKILRDVRHWLNQVLPSEQYRQTAEPGKKPSIQQAVKGRAQRIREEQAEKRQQSRTEKKQDMELMNVFEAVKQFVTTRQAAEHFGIRVGRNGMCVCPFHADKNPSMKVDRRFHCFGCQADGDVIDFVSRLEAVSPKEAALILAQAFSIPYEDKEPSSHRKPPQETPEQRFRRMERYCFRVLCDYRNLLRRWKRDYAPKTPDEDFHPLFVEALQKQDYVDYLLDVLLSPDMEERAAFIIDCGKEVSNLERRMAELAAGDTAGRRTDHARSTATPERMLESTEKGGVRNSIRNCLTVFQNDPLLSGAIAKNLLTERTDIIKPIGYHRTGTAITDTDMNYLLLYLEETYGLTSEKKIAAAIGIVANENGYHPIRDYLNGLTWDGTERIRTCLHHFLGADSDQYTYEALRLFLLGAIHRAFHPGCKFEVMLCLVGGQGAGKSTFFRLLAVKDEWFSDDLRKLDDDNVYRKLQGHWIIEMSEMIATANAKSIEEIKSFLSRQKEVYKIPYETHPEDRLRQCVFGGTSNALDFLPLDRSGNRRFLPVMVYPEQAEVHILDDEAASRAYMEQLWAEAMTIYRSGDFKLSFSPEMARYLKEHQRDFMPEDTKAGMIQAYLDRYTGSMVCSKQLFREALNHPFDEPKQWEIREVNDIMNHCVTGWHYFSNPRMFPEYGRQKGWEREAPATDTSNGAEKIPEGFVEVTEQMELPFMAKTKTEIHVTTVFDGELDAADVFVSLIAQKYGQNTGKDNLAKTQDLGYNKDEVQKNRVPSGLCGMMNGYEYTGMDAILAGSFRAAIYCRLSKDDDLDGESASIANQRDMLESYCEKQGWEVVAVYQDDGYTGLNMERPDLKRMLKAIERRQINLVITKDLSRLGRNYLQTGTLIEDFFPRHGVRYIAMNDGIDTMRDNNDIAPFKNILNEMYSKDISKKVHSSYLLKAQQGQFTGCVAPFGYRKDPEDKNHLLVDEETAPIVRQIFLWALEGHGPNFIRRRLEEQKVPCPTWWNRERGFRNVRTKWEKKDPENGRYMWDFSVIKDILMNPVYTGAIASQKKDYRFKIGTIGEKKPQDWIVVEERHEPLIDSKSFAIVQDKLKSRQRPRQDGETSLFAGLIKCGECGKSLTIRTTHAKHPQQIYACKTYGAFGKNHCTQHRVEYDTLYHLVLNKIRECAKAALTDGEAIAGKLTNTCEAEQKGQREALERSLTKDEERIEVLEKMVLRLYEDMVAGRISEANFNLMLDKTQKEQAELKERVAQGRKKLADEMRLAMDAKQWVDAIQEYADITELDAATLNRLIKEIVVHEHIDSDKTRHISIEIHFNLKPIPEVEQVKGMDRIFEAIEEWMRNLLTGMVSSNLTTMYTDVNEKTGQIAAQVGQTPQGWNGSIYSMIQNLSESVIVPIAGMIITFVLCYELISMLTEKNNMHDIDTWMFFKYFFKMWVAVWIVSHTFTITMAVFDVGQSVVSRAAGVISSDTAINIDTMISTMETAMESMEIGELVILALETMLVSLCMKIISVFITVILYGRMIEIYLYSSVGAIPFATMSNREWGQIGNNYLRGLFALAFQGFFMMVCVGIYAVLVANIQMSDNIHSALFGVMAYTVILCFSLMKTGNFARSIFNAHMAFVSVPKDLTKVKNKIIFNLTKRQLICFGIAAAVGLPFYFLSRGIIGSSNAATGMCLLMLPAFLFAMYEKDGLPLEKVLKNMITVKFIRPPVRKYQMENMYEKKYTVVRKKKGGTKGVKKKKRMLKRKNDRQPQSMEELYPDDYWLDEEDGEEELPVPEMKRKPVSGRLHDEPMVTGYEALERQRGVRRPNRKLTRREKKALKRAQKYEEKLHKEHEKADKKNAKREAKLAARAEKQAVRDAKKNAKKKKSRPAAAPPGQRPAGKAVSGTRSSGAGKKTPDSARDKRITAQQSIPYHEMGRDGICRVQDKFYSKTIRFYDINYQLAQNEDKNAIFENWCDFLNYFDSTIHFQLSFINQHSNMAEYEKVIHINPQEDEFDDLRMEFAQMLNNQLAKGNNGLMRTKYITFGIEAENIREARPKLERIESDILNNFKILGVSAYPLNGEDRLQIMYETFNQDSKVPFHFSYDDVLRTGLSTKDYVAPTSFVFKNGKDFEMGGTMGAVSYLQILAPELTDKMLAEFLEMDSNLMVNFHIQSIDQMKAIKLVKSKVTDINRMKIEEQKKAVRAGYDMDIIPSDLNTYGGEAKRLLEDLQSRNERMFLVTALFLNTAPTKQELENVVFQTAGIAQKYNCALKRLDYQQEPGLMSCLPLAMNFVPIKRALTTTSTAIFVPFTTQELFMAGESIYYGLNALSNNLIMADRKKLKNPNGLILGTPGSGKSFAAKREIANAFIVTKDDIIVCDPEGEYYPLVRAFHGQVIRISPTSHDYINPMDINLDYADDDDPLSLKSDFILSLCELVVGGKNGLEPVEKTVIDRCVRLVYQDFLSDPVPEKMPILEDLYNLLRNQKEQEAQRLATALEIYVNGSLKVFNHRTNVELSNRIVCFDIKDLGKQLKKLGMLIVQDQVWNRVTVNRSANKSTRYYIDEFHLLLKEEQTAAYSVEIWKRFRKWGGIPTGITQNVKDLLASREIENIFENSDFILMLNQASGDRQILARQLNISPHQLSYVTNSGEGEGLVFYGSTIIPFKDKFDNSLMLYALMTSKPDEVEKRKKLGIGERDDMKDYRNMERCSGEPCCIFAERICADNEKEILKMEKDTKEKVTADEMMDDLIYLAELIDFMGITSWLAVRGTLSERMTDKLTDSIAGMADEVLEKWEDYQDKTEMQEHEYKARDKTVQKMSRDGLREENLRNKEEKRITGRDTDTEISRSEKKEELDFSKRRHERLKEEREMEQPEQSSRKPRYSREHADILDDEQDIATDADVEEGLTDDSSENPKSAFRTESIRGQPRGERAYLETVADSRDLRKKKMVRDYAAKERRKEKETSREEKAAKRESARYRETSEVMEDSLDKFHEEIKGKSKRERVLKEQRKKVSRLSFGDEGDGMVHGAGIGIRNPASAVKDAAVTAAHWKTHEKEDENAAVEGAHRAELVGESLARKSIYMRERLKGRREESRRLKESVLDEAERSRLIFETAYGNEAKDAVKREAEKKKKSALQKLFQKKRYQKQYQAARQSKKVKDAAITSAQKFTEKAKDAVKMVAAQNRGIFATVAVFALIFVLIAASFTSCTASLQGASSAIISTSYSSTDEDIYAAENAYRALEEALNTQINQMESTHPDYDEYRYQIDEIGHNPYQLTSYLTVKYGGFTYDEVAEEIKDIFRQQYGITTDSTRETVTETKTVRVGESLGLVVTSGYCNCPICCGQWSGGPTASGAMPTANHTIAVDAANPFVPIGTHVVMNGVEYVVEDTGAFARYGVQFDVYYDNHAAASAHGHQTWEAYIADSNGNQEVQVTTTKEVNRLDVTMTNHSLDAVLRSRMTEEEQERYDAYNKYYGNRDYLFDLNSIPTGSSGFGYDIPADALSDPQFAKMIQEAEKYLGVPYVWGGYSPSGFDCSGFVSWVINNCGNGWNVGRCTADELRSHCSQVSLSEAKPGDLIFFQGTYDTPGASHVGIYVGNNMMIHCGKPVQYTSIASAYWQEHFMAFGRLHMNMKLKKLLNDIQKTEDKIAELQEHLKRQNTLRQQMEDIEIVKSFRSMKLDSRSLLVLLDGIQKGTVTIQMDEDGGITVEDAKAPQKKENNAEVHRPPVGQMTEREVLDDEEMLKKLLMIAMAVTMISGTSIATVYANANPPAEETTTQVVEETATESTEDTEKKEDTGRVTGEGDNSAFSTPGNAQLVDDKENDDTKQFLTIQTKKGNTFYMVIDRSSNTENVYMMSLVDENDLAEFLDETEKSKETEESTVVIPETTPETTPVAEEETGVKKEEKTGMNVKGLGAIVLAAILGVAGIAVYKKHGRGKEDDYVSEQLEFSDGPYVNEEEDEEEEMSKFLVIAEKPSVAQSYAKNLSAYKKEDGYLEGESCIVSWCLGHLAEYAQPEEYDPKYGKWQFDDLPILPQVWKLKVSRDKKKQFDVLKSLMNRADVDYLVNGCDAGREGELIFQRVYDLAGCRKPVKRLWISSMEDTAIRTGFQTMKGAEEYRNICMAAVCRAQADWLIGMNGTRAYTTCYFKRLVVGRVQTPTLAMLAERQDKIEHFQKEAFYKVALTDGRLTVVSENIANEEAADLLASLCMDSEAVITQVKREQKKAFPPKLYDLTSLQREANRYFGYTAKKTLDMLQELYEEKLVTYPRTDSQFVTEDMRDTVEELVGKMPVLLPFLDYGQLGHNITRVINNAKVSDHHAILPTKEAVEKGISDLTADKKNLMMLVCQQLVQATGEEYQYEQTDITVKCQGHDFTARGKVPVQMGFKAAGNAFKNQCVKAKPEEETEKETSIPYGYEEGMTLSPVKAEKTVHFTSPPKPFNEDTLLAAMETAGNKDFDSETEKKGLGTPATRAGIIEKLVSSGYAVRKGKQILPSTEGRELVNVMPAYLKSAAMTAEWENQLLMMEKGQITDTQFMGEITSLVGKILSVCREIPETERRRFQKAREVIGKCPVCGSDVYEGKQNFYCSNRQCDFALWKENRFLGSMEKTLDKKMAVELLDKACTHVKGLYSRKKDIKFDADLLLTLEDGKPRFHLEFPKKKMSKLQDIRELAQEHATSVSSSPRDWMGYMDTAARLYRYPFTDQLLIHAQHPQATACASLELWNEKMFRWVNRGARGIALLDENGHNTRLRYVFDISDTHMVAGGRSPYLWQMQEHQQEEILTHLAEAYGLEEKDTGTLSDALMAVAREMVADSLEEYLDGLEYAAEGTYLEDLDEVTVRSDFRQLATDSVYYMLCRRCGLEPMELLEEEDFMHITDYNRLSVLTFLGNAASQISESVLIDIGRTVHKISLEEARKEVEISNERNYNNFNTLMRENKGVENNKEENIENEGGTDYGTDISSQGGLPVSEPDRRGGRSDNREIRDASEDIPEGTQEQPVSEPVPDRKAEQPSGRDREGSTGEDGQPDGETAEEPSGTGQGSRPDGLDSTYERTDGNSGREHLDGIGIQLVEDTREDGLSKAEEEIASALSLPEYPIANEQKRQIGERVAAFYAGEIPIPESVVDDILRTGGNRTGSQLRIIYNFMSEQSPGEYTEFVKREYRKGGKGFQMDGREYSVWFDETGMQIAVGHTVADQILDKAFLSWKDVSRRIHQLLNQGEYAPQSVLDAARSNAVKEHAQALAYMKGDMAEGVAEIVFDEEDLPHLRSIYPEITDYLEEKLEDPQWLSELNERLDALAEAYEENHSIMRFHHYNPVNISRQFQKFADEVIPYQAREGFAWKEQQMFITQDEIDAFLVRGGAYSEGRLRTYSFYLLHEDERSRTGFIKEQYGIGGSSHALSGADDSHANYDGKGLFLARGAYGNPYTSVLLSWNKVANRVAYLIKNDQFLQAEDYARMSEYEREQMANKVLRFYDRLPEEIDRPFTDDFFWEKPGKEMVAVLENPEQAEELLQKMDAALAVLPLDFEAYGTNYQQKTELLSELHQYAEGTYTIFPTLEAEPSFVEPSGHQMTMFDFLDTKAVTEPTVVDMSDVEEIEEEEVTAEESISESQEQEIIETSEGQEQKEPEEEVTAKTAEELAESWDEGVFEYQGYHFEAVGVLPEGIEGKDLVAQTRSNTELHLSTYHTEDFPKYSYDDFYAVSNAPTADVFRCLETGRNYIPGENELFGYEGEFQPYLKPEVEKIVTEPHNFRIQDNDLGAGGPKAKYKANMEAIHLLQTLEKEERLATPEEQEILSRYVGWGGIPQAFEENNSSWANEYLELKNTLSPEEYSAARASTLNAFYTSPTVIRSMYEVLENMGLKQGNILEPSCGVGNFMGLIPESMSKANMYGVELDPVSGRIAKQLYQKNKIAVQGFEETSYPDSFFDCVIGNVPFGAYQVSDRRYDRHHFMIHDYFIAKSLDLIRPGGVVAVVTSSGTLDKQNPAVRQYIANRAELLGAIRLPNNAFQRNANTSVVSDILFFQKRDRASIEEPEWLNLKEIPEGYSVNAYFAEHPEMVLGDFTTESTQYGKQEVTVKPKEGITLEEQLKEAIRNIHGTITELELSDTELEEEVVSIPADPEVKNFSFTVVDDEVYYRENSVMNRMELPAMTAERVKGMVKIRDITNELIQCQMEEGSDEQITKLQGKLNEEYDTFTAKYGLISSNANKRAFSQDSSYCLLTSLEFLDDKGELKRKADIFTKRTIRRAETVTSVDTASEALAVSIGERAGVELSYMAQLSGKTEAELTEELAGVIFKNPISEKWEPSDEYLSGNVREKLQIAKQFAEDHPEYQVNVQYLEQVQPKDLDASEIEARLGATWISEDYITRFMAETFHTPRYYVGSKVKVQYAEVTGQWNVMGKNVDSYGNALVTSTYGTQRANAYRLLEDALNLRDTKIYDTVQDADGEHRELNRKETMLAQQKQELIKEEFKEWIFKDLHRREDLCKIYNERFNSIRPREYDGSHIQFVGMNPEITLMPHQKNAVAHVLYGNNTLLAHCVGAGKTFQMIAAGMESKRLGLSQKNLYVVPNHLTEQWGSDFLRLYPGANILVATKKDFEPANRKRFCSRIATGDYDAVIIGHTQFEKIPLSRERQIAMLEDQIADITFSIEEAAHQAGQNYTIKQLEKTKKSLQARMKKLNDQTRKDDVVTFEQLGVDRLFVDESHSFKNLFLYTKMRNVAGISQTDAQKSSDMFMKCRYMDELTGGRGITFATGTPVSNSMTELYTIMRYLQYDTLMRMGMGHFDSWAATFGETVTAIELSPEGYTLIGRMSRTSKITALYERLSRDDDLNGESNSITNQDVICRGWFLPPNTITMKSIFEEMGGTYTKVGDYYIPDLALPETEEYQIGKYGRMRRRYLKEHRPVLYAHYLTSCTLHEHLAEIDKSCNQRMEIMCEAMARLEGVTEALKATDQMEWVRRMNNIHNRAEEIVLTELVYCMPENQNIEWKAKWKDDYLEWICGFANAQGGKIYIGCDDDGKVIGLPNIRKLLEDVPNKIRNAMSIVVDVNQLERDGKEYLEIVVPPYPVAINCKGVYYYRSGSTMQTLSGPELESFILRKRGASWDNMPLPGFTLDDIDDELVKRFKTLAAKKGRIDQSVLDEDKADLMEKLRLTNAGYYTNAAMLLFCKDPDRWQLGAYTKIGFFENDADLRYQDEIHGSLLEQIDKIIEVIHLKYMKAKITYEGMQRIERYFVPDAALREALLNALCHKQYESGVPIQISVYEDKLYIANCGRLPDNWTADSLMSKHASRPYNTAIANVYYLTGFIESWGRGIEKICQACKEDGSPLPAYTVHPGDIMIQFTASEDRVIRSATYKVTEKVTEKVTEKVTETLDEKSMQILALISEDPAYTSTTIADKLSISRKTVSQRLKELKEKGIIERIGSDRKGYWNIKSMNTFFEQSRSHWVRYERYEIKTGKDGKKYITPAKDARPDVYNPLKEAPDIVLDALNVGMLMMNGKKSSEPEVEKAILEFITHYGLLGLMTALPTTPSFMDYEAVYLPKNHFIKEETMETEKYLSLFYPFDRLDVVKNGVESSWNVSSDRAMIALTMTFMDEPMAKTMSFQRAYAEPYDWVAQQLKDWAFNMLTSFFYYNDYDSMEEESRNMLRKSMAAFGGIAPTYHIELLDRPTIYWDFHSLLLGIQMMFSFMLVDSTKPLRMCKQCQKVFLSNRANSAFCSARCKNQYNVYKSRGKNKSEDGDNNAMTDENRTFLLFPDDGDDLTEWDEASDLTIQNEQLEEILSEERALELERELEQDENPRDYTVELEDEEEEAAPVSEKRLKRQIRAEALARLEDAARTEDDFRYVVSEWDRLDRNRERRERDHENLRGDVPLEYMAVPNPKMIPLYLNLPRYRQLASGNFLDIIFSCPYELHELVASSFISELIRSLTIDQKEVLYYLSIRQYSTIQVGMIRGQTDRNIRKLRKNIHKKLQRAVYDYLLEKQNDCGSLTLRERQFLEEYGLLLKAYGKDAVILRENKSKPRKKKAALGSSKDSEMDKNKQAQYMIRRIGGTTYKVRVAFSESGKETMEDKILRMIRNEVVTNDGTCDIIGVPQMSRQSERSASMSIIQTEDKITALYERLSRDDDQIGDSNSIVNQKKYLEGYCAQQGYTNFAHYTDDGFSGGTFERPAWKKLVADIEAGKVARVIVKDMSRIGRDYLQTGFYTEVMFRQHGIHFIAIANSVDSNDQNSNEFAPFLNIMNEWYLRDLSRKQKTAIRVKGESGKPTTNSAIYGYKKDPNDKHHWLIDEEAAAVVRRIFRLTIEGKGPYDIARILFEDKVEAPAVYFARKGIGVWKSKTEFAYPYNWSGYIVGQILSKPEYMGHTVNFRSHKLSYKDKTSIPNPKEDWLIFENTHEAIIEPETWELAQQLRKTPRRIDTIGEANPLTGLLYCADCGAKMYNHRSRGGTEGTPYPSDFFDCSSYTLAHQKHGKDCCGHYITTKSLRILILETIRTVSQLAIADREKFTEKIRAASQVRQVEAAKDAKRKLNKDRKRHSELDTIIKKLYESFAVGRISEERFDSLLAEYEVEQKNLSAQIAETEESLTSYEEDTARVEQFLALAEKYTDFSELTTPMINEFIDKIIVHAPERIDGDRTQEVEIFLKFIGKFELPAPELTAEEIKRQEQLRQHRIKSRERYQLIKAGKHTVGQPFQLTCKCCGQGFESKSSAAMFCGPNCRAKFYRQEAAENRRRDCTCENCGKTFSTTRSNVKYCSDECRYEGHIKGQRVRNAANRKEKLAAETVTSPAMNLFETVKNNVSLREAAQAYGLEVNRHGKALCPFHNDRHPSLYVANDHYYCFTCGEHGDVIDFTARLFDLKPYDAAMKLVIDFHLDPDKPPSAAALNAKRIRTEAQKLKENERLCFSVLSDYYRCLEEWKAYYAPQTPDEPVHDLFVEACHKLSQIEYELNILTFGDSYERREIVQDWMTDGEIIALKERLEQLRKEETYGRIEYPNGYAAMDELNTPMVMPPEESIPDWYDGKRINEVLFCQQFLKKHPMKCVRGRLFTVDGLIEDEAQIGNLILEEISGCLTSGLSKVVANLLASIKLQAYSPPLPIETDRIHVANGTLFLDGRFTEDKSYCNNRLSVAYLPDAPPPVRWLQFLSELLVPEDIPTLQEYMGYCLLPTTKGQKMLLMIGKGGEGKSRIGLVMRSMLGDNMNTTSIQKVENNRFSRADLENKLLMVDDDMDMSALPKTNYIKSIVTSECKMDMERKGVQSYQSQLYVRFLCFGNGALTALHDKSDGFFRRQIVLTTKDRPAGRADDPFLVDKLTQEREGIFLWCLEGLRRLIGNEYQFTISDRAKENMETVKRSSNNVIEFLQSEGYIRFKADSEASSKAIYEAYLRWCEDNAQKPMSANRISSELAQNERLYNVEATNNVYAAGKRVRGFIGVEAMNLLPYMNYMNNNPIIIGIDHGYGNIKTAHCCFPTGVIISDKEPTFKSNLLVYNGSYYTVGEGHKEFISDKMTDGDYYILTLAAIARELNIRKQTSARVHLAAGLPLTWVSEQKDSFKAYLLQNEMADFIFRGVSYHVEFAGADIFPQGFSAVADRLRGFKGINMLCDIGNGTMNVMYINERRPLSQKCFTEKYGTNQCMIAVRENLMRQFGASVDDTILERVIRFGTADISERYLTAIQNTARDYTAGIFRRLREHEYDPELMRLYVVGGGSCMVKNFGEYDASRVMINDDICATAKGYELLSAQKMQKKGDLVMKQIYTTTLRLNLENEADRRAWEHLQSLDRREYRSVSKAVVSAVNAYFDRSKQLADDPYLETREKEDAFLSRIEDTISRSLQSCTPVSLGGILQLMQSAQPAAALVSEETEEDISAALDFADGFMANKKIMTKEELQAKHRLEEAQMRDRAKERKARTRRLIQEGAVLEKVFPEAQQMELEKLEDLLYEKLHMLPISAIKLPVAGFRRQEAGRVSAGLVRQAAISASAEAPTAQGMLTCGISCPLWRSVRWTVREERTSPTNGRDTTACFAGGEMAIYHLEAKVVSRGAGRSACAASAYLSCSHILNDYDGVQHDYTRKQGLVWQEVFLPDMAPPAWQDREVLWNAVEENEKTKDSRLAREFVVALPIELSLEQWQTLLTDFVQNQFVADGMCADLAIHDPDPPGHNPHAHILLTVRPLDESGKWQYKTEKEYLCSRDGEERGFTAAEFKAAQADGWEKQYQYKVGRKKVYMTPSAAEEHGYERASKYPKSTKYGRQNPISERWNSEEQLLIWRKAWADVTNKYLERYGHEERIDHRSFVERGIDEQPTIHEGVIARALEQKGIVSDRCELNRQIKADNRLLRELKAQFKKITEAVKNTLPAIAEALEKLRENMLIFCYQLGHIRSSKKQMTGALNILKPNLAQYRSLVQQIKETTKERKSLLAEKKSLPAIHFVRHRELASKIAELTEKLEELKSEKAMLLHSLEYPEDATSDIFQRQIDRYEDNLKRLEAQENKYAGELEAALSEYAELKEQASGFDSLQLYLERKALRPDREKAAAQRIEAAYGDKFSWWLMESGLRDVSGYLDEYAQEKTMDRELRQRRRSERLERKMKNRDMERMTRKNISDAVGGIGSRHIEETASYQAKKQKSIWLKFGAIAACLCLIVVGVFSMGLFGKSTETATLGDGTTISFTKADTVASALSLNLQARALTKDEVQTIFGDLPISGDALFTLDDVAFVGFDGHYSDMKFVVSLSGNNLMDTTVIGKGNVSMVGDTPVKAGYFVTNANSEGIKTVIYYAYITFDNYSIYIENAGGESEREAVRAELMAALDKLLENSFDFKMLEDVKIIELFFARTEQAIAELAAKYGSTCKRIANNILKCEPDAEECVNDTYLAAWNAIPPERPDPLRTYIFRITRNIATAKYHANTALKRNSYYDVALDELEECLTSASTIEQEVDAKELSQEIDRFLDSLDQESRVMFVARYWYSDSITEIAKRLRTTNNNVSVRLSRIRSKLKNHLQKAGYDLMFEYMTVQDAAKLWGISVRRVQKLCEENRIDGIVRLPRAWLIPQDAQKPADGRYKQNKNEFIADNKENTRMSKLLLVEDDQSIVSSLSDYLGNEGFKIENAPGQKEAIEKLDSDQYDIALVDIQLSNGNGFSVCSAIKERGTMPVIFLTASDDEYSVVAGLDMGADDYISKPFRPRELLSRINSVLRRTKNTQNIISYLDLVVDTNQATVSKNGKEILLSAMEYKLLLVFLRNKGIVLSRRRLLELLWDTTGEFINDNTLTVYMKRLRDKIETNPQEPEIIITVRGLGYKVGMDFIRNKEVKRQIVVSSILILFWGGIGIIVDSKAVWIVLSAIISSSAVSLFFTYQRYKKIADFSLHIDRLLHGDEKISFGQFQEGELSVLHDEISKMTRRLIEQAEALKMEKGNLANALADISHQLKTPLTSLNILNASLCNEELTDEERYELIREQTMLLSRMEWLIATLLKISKLDAGTITLKPQAVYLKDVVEKAIRPLEIAAELKMQTITQVIPAELKLSLDTDWTAEALGNVIKNCIEHSPEGSTIEIKAIERPLLTQIIIEDSGTGFQEKDIPHLFDRFYQGSGSTIGNAGLGLALAKTIIVNQGGVIQAKNRESGGAKFEICFYRGTAMEILRVENICKTYEMDNAPVHALSDVSFSVDKGEFVAIIGASGSGKSTLLHILGGVDRPTSGKVFVDGQDVYEQNEDELAVFRRRQVGLVYQFYNLIPVLTVEENITLPIRLDGRKINQERLKELLSTLKLVKRRKHLPSQLSGGQQQRVAIGRALINAPAIILADEPTGNLDTENTRDIMKLLRESNEVYRQTMILITHDREIAMQADRILEIQDGRLVRDEVIRMNMIFMLTLRNLLSNKKRTLLTLLTILLSISMITAILCGGWSLVDFLKEKEKVYGGDYDYYMEDLTWEQVQELYSQNNVGEVSLLRFAGNSFYGEKSNSTMLSVGEIDENFTQRFSLNQYLLAGRFPQDENEIVISESFLKKNNMNTEIGDTISLTLGSRIWDEYNAQLSGLTNYRGEEESFVPTKEKAYVVVGILSDVNDSKIAANYNAFAGVDKTASDFAAYVKAKNLSNSIYTEAEEVAAAVDSHVAKFHSELLVYHGITGGKGAAKLIALVVMVVCLLMAASASMISNALSISLQERIKQMGMLSSIGATKGQKRLSVYLEAFLLGVVSIPFGLVVGILLSALLLSVVRAAFGETFTFGIVELSLKVNGLILLVSGLSGIASLYFGSRKPVKQAAKITVIEAIRQSNNAVSRKKFRDGKIVSLVFGIYGSLAAKNIKRNPKRFRAITGSIFLSVVIALSLYSFSDFMLYQTSLDMKEDGSCYTDVISMIQYKDIPVAIGALSDENITADVSYSFQRYMTAEFSQEQINPDMQGYFINGTKAEVYVVGLDEEHFVSFCDENGFSLDVTNFNHGILLNQTMGYYNSAQNRVIAGSPFLIEPGTEIIPLGASEDALPIIVEEIVSEENANIQSMFVRDRAVLIVPLSYFNLLIDDNAYVEMRIQTAQHKEAMECLADRGFPQTVDIAAATNNSRQVYTIAKLVICLFSILMTVIISLNVCNTISNTIHLRRSEFAVLRSVGMTAKGLKCTLLLEAVLYGVKALVLALPVSFLIHCAIYYFISSGMTPFAFYMNGGIYALAVMAVGAMVCIAMLFAVRSVSKVEIVEELKLSNMMRKKKLVKRVAGIALTVGAVILAIVCVGKVNRIQNEKDIIGTWKDANAEEIFTFQENGELAVSKDMPDSGLSCGDAYYSFSYSDIICVTQGNSSVEFEIEVDQNELKIFFMGQEYLELEKMNFNRPGFQALIKEVEAGNVGTLIVKDMSRLGRNYLQVGFYTEILFPQKDVRFLAINNSIDSNNASDNDFAPFLNIMNEFYAKDTSNKIKAVFDARMKDGKRCSGSIPYGYNRLPSDKQTLVVDPVASEVVKRIFLLANEGKSPRAIAEILTEEKALIPAAYAKEYHPEQYNGIKFADPYIWGISAIRTILSRQEYLGHTVLRKSVSTNFKLHKRKTTDEDEQYVFYNTHEPIISQELWDCVQKRKKRVNRAAARGTHTNRLSGYLYCADCGRRMTLQTHYSKKDGSVQYSYRCGGYASRVNSCTSHTISADNVEALILSAVKRFSKFVLNDEKAFALELQSLWKGKQEEKPKHNQSELKRCQKRYDELSTLIRGLYENLISGLLPERQYKQLMKQYDDEQAELEMKMEAMRKELSEEKDSTMDIQHFVSLIRKYKNPTEVSDLMFAELIDKIVVYEAEGVGKARTQKVDIYFNYVGQVDIAYTEKELAEIKEQEEQEEKKRLEKQRQREKAYREKRKAKKLAENGGEIIKKKICPHCGKEFTTTSNRQVFCSKDCCYQARQDKTKADREAEKGNHYYRQRVCAVCGSTYWPTHSQQKFCSAECKKVNHNKKTLEFYYKKQKEKELCKDLLQTKEQVSDTNSSEITIIPAMREHKRVLYYTLLTSGKLYEHLAEIDTSARDMAEYLIKEMARKQGVTEELKARDMLRWVGKMNNIRACADEIVLNDIVYFMNEREKIIRLWFDMWIKKADLGIDNIFTDDVVYTESWSPKYENRKTVKHWFDEWNTRGSVLVWEIKQFFHQGNQTIVEWYFKSKMNNGNVEEFDGISLIVWTQDNKIKSLKEFGCNLHNYNPYRDSDIPVFREEKANWFMPRMSKKRKQEWALFLNDRNRIIYNELCRKCRNDCKQSFRCIVVLCPKYLSKRRTNKNDMIENEMTVSVPLEVVKASEIEPKEVKWLWYPYIPFGKVTLLQGDPGDGKSKLMLSVAALLSKGEPLPFTETEENEPVTIIYQTTEDDADDTVVPRFNSAGGNGENLIFIREDEKSLSFGDNRIREAIEMYHAKLLILDPMSSYIGEICSMNNANETRAEFNHLIAVAKDTGCAIVIIAHMNKMKDTNPLYRTNGSIDIAGAARSILAITRTPNKEVPAERYLVQVKSNLAPTGSAILFEVSEKGVDFISEMEMTAEEAFQSLAPKMGRPNEKEIKAKEFLLEILKDGEMLSSDCEERLEAAGFKKSTIKKAKKKAGVISKKKGFLWYWSLPMGDIPREMTKTDKADMSCARVKQYTASDVSKAERHNERKNETYENMNVIEERIPFNVHFKTPTAPTYMEQLKQMETDGLVSLRGLRKDATLFNEIVIDVNTMYFERNGGYEYAKQFYEEAFHFIEEKFGAENVISAVMHADEINIAATEELGKEVYHYHLHAMVLPVVEKEILWSKRCKDEKLRGTVKEVVHQISHSKKWKSDIPLTDEKGNPLLRKNGKPMFRASYSILQDELFNHMTEQGFKGFQRGEYGSTAEHLTSLQYQIKQDKERLEKLQKRIQHEQIKYEPARNVSKTYNEIDRMGQKTITGKMAISKEDYSELTALAKEGMTSRAEISKLEQSANYYRQKYFDCANALERMKTKYNELKEKCRPFLQALEHFPEVAKLFTEKVKQLFSFKEAQERAEKEAREKERQERIKARRNKRDMERMKEQKHSYSQRIGKTTFIVNVKQSESAKKPLNTVFQDICKHEVLGGFFTDKSFNLENPQKVSMLNLPVPEAEFINEVLKPSEEQQEMVSAFSERAEEVRAGLVNPTVDNMLKITNDGRKCALDQRLLNELLPDAEKSKVNTCVENAFQVWDEGKADRTTQLIFCDLSTPKGDGTFNVYDDVRNKLVARGIPKEEIAFIHEYNTETKKADLFAKVRAGQVRILMGSTPKLGAGTNVQDRLIALHHLDCPWKPSDLEQQEGRILRQGNQNDKVKIFRYVTENTFDAYMWQILENKQKFISQIMTSKSPVRACEDVDDTALSYAEIKALATGNPYIKEKMDLDVQVSKLKLLKANHTSQIYRLESDIAKNFPVQISALKERIAGMQVDSQVVKSVDLQDNDTFAMTVGNVLYEDKKEAGEALIAACAGLKTVSTGGKVGEYHGFTLSASYNMFSNAFELTIKGKCSYKLEIGKDPVGNMQRIHNTLSSIDRKLTESEQKLETVQQQLATAQEEVKKPFPKEAELNEKMERLSELNALLNMDEKGNETIMADEDIGREGSSTDSRDAVEEKELPETADRIHKPSILERLKQEKAQQNTAEPTVTQKAAKKKHEQELMANNIEKQLKEISERLEQGVKEIFTSERYTEYLNTMSKFHNYSFNNTLLITMQKPEATLVAGYHAWQKKFNRHVKRGEKGIQIIAPAPIREKQEIEKIDPVTKEPVIGDDGQPETEIVEMVIPRFRVTTVFDVSQTEGEPIAELEVPELTGSVQFYDTFMQALQNISPVPIRMMNVEGDAKGYYHQTEKYIAIKEDMSNVQTMKTGVHEVSHALLHDREVMDAEGVLKDQTTKEVEAESIAYIVCNHFGLDTSEYSFTYIASWCESRDMKALKASMDTIRKTSAEIIENIEAQMYELEMERPIRDTFHKEDLILHLSGSMGSEFTYDLIENMSREQLEQNVGEYVRLLESGEIEENEKPLESFLEEKGAAVTPLYDSSGHGENYPIDFYDVEYDADTGVTYFSDLSPKEQAEMLVHKAEFPRNIFSEEEKAFVNEYAETFPGRVERLNDLVWDMRESYDEAGSKLVYEVIQAARANFPVKEPEIVEETAMQYAHRLIETAEAANTGNFTDSQRNLIVNFAYKMDDKDEVLGLVNRMMTAIRRPGSEYTRSLMNETQAQIDNFPDGMIGFTEMHEAGIQLDHMLPLTKDRAYELYRGGAEIYILHGNPENPQRAEQMLVETESEILGYDGIFGITETEWEVQKEREISATKQEALVQQSAEKIDETLLLHGESRRFAIYQMDTGDEHTYQFMGMESAKSLGYTIDGKDYRMVYAAPWMPTITLDNIFERFNIDRPEDFRGHSLSVSDVIVINRGAEITAYYVDSFGFQELPEFVQQRMNMLEHNSVRAYPPVYKGTLEQAMGERDVDAYLDSRKLNLDCKKAIEEAIRENFDGLHLKQDAAKEVVERFGEERMNFVMANTIRELSHDGRFSRQNKDWAEHIEVPENVSRGRNLNLDYVIESHPAVLDGFIDMARAEIRMQRIEQAIGENEVTITAETRGYEAEGHNGTWHTVDEKEYAGEKFFLMEHDEFGSDVAGIIVAENGQLVAEDLWNGFDAGALEAVSEYLQENGTTLYDLTEFPKDSVVTLRSGQTLTIEEIQAVQKDTWEETMAGKNESGTDVRFNFHAVSEVQLPEGIKLKMPEIHYVDNFYVMEDVNAEGVVKVNRYESLDEAMQEYLRLPNHQEKVLGIQNTETMQESMDFIRCENGIDQLTHAYEQIGGWLNPEIYEAVNKMENMLDWNEVQIAYQIGKQYFTIQTAEDGYDYTFYNEDYQEDDGGIYDNPTIYVDEAASDILEDKGYSLEDAKVVDYEELMADVEEVQEEQMQRIQLEKNCPASIFEGFRREEAMQTYEGIAMQFIRSKGYLTIQATEEGYSFIFYDSDLHEIQSGDYDNPDASIQEAAYEILKSERMDDLECVKVDYKEFEEMTIQHSKDLLQEGELRATSEIGRNELALNSLSRAEVERGVLYHAQAVLEDMGMEQEVELLAARVYGSRSRQDLYREDSDLDVVLSYKGDIREDSFFNALNESGIAMAGIKVDINPIAEERITLAEYIKESEKYLDQQEIKKLAVDLDNFSYDVDTYEYNDTVENREEQVEKLTEDILNKKTETIKDWLLEVSEESDIDSDVITARSLLSRLEDTERFSIFDKQPEQEQPEATISFYVAECMEFPVMGEYHNNLTLEEAIKIYESIPAERLHGIKGIGFDLQDGDENYSGEYELMSADRIRRDLIDMIPHYKESPLVQKAIADMEKYLDEKHGRVKETEYTTETVIGSGQKPSAVAADRRAEQEPVSVNRSQPQKAEPASRAKGEVKKSVLQSLKDFQARAKAQEQNKTTEKSKTHKKGEVELMMDLAMNFDADECLVTAMFDKGNRNDTMEAIDHIIPFLKGDADMIGLVCNTIRKLFCMSDEGYEVFLMDLEEYKMELEEEDEEMSTSQCAVYQVKDTPEYRDVRFRSYEKLKSEGRTVQIENYQQVYIGRIQPGETPADIKLRLQKQRPKNFKGHSIGCSDVIIITDDGKTTAYYVNKDGFIIIPEFLTIKSSSDTRLSIDTIGYEIEGKKGTWLAQDYILMNEKKWFLMEHEEYGTRAAYVILSEEGTVVMNDCYNGFDEEARRNIQNFMQQQAEQAQQKQQEMQAQAQTGQTQSGETQKKKPELANWQKVMDNGEYLRSAEMAEEANYNMIDGLMNNTPKKKDKNAPRRSVLKRLRNHQKKIASQGKGQPQQQKAMEEEMERKKKMVNTSETKNEKLQNNEATVQVMKQPKTFAQQVEIIKEKGFIIDNDTECIGFLKQANYYRLSAYFLPFRKKDGTYFSNINFHRIQRIYEFDSRLRGVLFNYIEKVELYLRTQLAYYSGHVHGALGYMDGAIYNDRHNHEKFVKLLNVCIEENKSTSVVQHHKEKYGGNFPIWVIVEFFSMGMLSYFYADLQSGDQKYLAKELYGTSVACLKSWLRCITDLRNRCAHYSRLYYWSFPALPKMPRELEMSPNRKLFSQILVLKLLYPNKKEWINKVLIELKAIVEEYENDISLRHIGFPEDWYEQLEKMAVIKHIASKNSDYGESERYLIFQHNEYTRKPILDEEGHMILREECYLDGLNCDPFTFASECQELNSYYHKNKNFNEIKSHHYIISFDPKDRDECGLTGERAQQLGLTFAKKNFPGHQALVCTHTDGHNESGNIHVHIVINSLRKYDIPQEPYMEFDCEAKAGYKHHLSTAYLIHLKQEVMDMCKKEGLHQVDLLTPAERKITEKEYWAQRRGQEKLDKLNQKMKEDGITPKGTRYQTEKQFLRDAIDDAASTARSPEEFSKILDEKYHIIFKISRNRYSYLHPGRKKYITGRNLGTRYTEDFLLKTFEENTKSHKEQKEEILEQQTPNTSTDSPTVPFSDTSAIPAPFIFIKSDLRLVIDLQTCIKAQQSEAYAQKVKLTNLKQMAQTVAYIQEHGYDSLDDFHATLDQASDQTSASRKSLKDTEQQLKDMNEQIHFTGQYLAYKNVYADYRKSRNKEKFYEEHQAELSLYDTALRTLKEKSGGNKLPSMKALYAEKDRLVELRNRQREDFFNHRDYERELRTVSANIDMILKKNYEQLHDRKEPNLMTRPKKEETLAKTKDVHLRMNETEYDLLAERAKANRMTVSDFVRSALDNQKVIIKYEITADVPEIKKLISEFGKIGSNLNQIARYFNQGGIISTEMKNEIRKSLRDIYEMKYEVMKMAGDFRGSNMNIKLVKNYNQIRPDRATLFCFPFAGGGASAYNSWVQKMKDKVTVCPIQLPGREERIMEKPYNNMTDMLDELEETIWKCIRGPYAFWGHSMGGKIAYELEKRLEKRGKTAQCFLVSGSRIPSIPERNPIYHLPDDEFKKALGRFEGTPKEILENQELLDFFLPMLRADFTMDETYHDKKLTVLQSPIEAFGGRKDREADEEAMKEWRKYTKRAFHCHMFEGGHFYIREQEEDVLSEVQKCLLGVPDENMHMGKLELHTGEVHIWKLRWRELETFWEWHKPLLEKEEYQKVKHYHFYEDQMRYLTGKIAVRMLLKEYSGVDKIVLRKGKYGKLYWKAPPGQKEITFNLSHSGEWVLTIFACQQAVGIDVQKIGEIPEYMEIAEKFFATEEAAEIREAGNSERFYHYWAAKEAYLKALGIGLNRGMGFFSVRGNRIIENGKVKSGWKLYPILIKDYAAYAAVQEKGRMAGYKKNMAQYENLEGWEKLSLGMQLDKWAIRYGNRIAVTDSEEEITYSELNQKAIGTGQYFMEKGIQKGDKVLVQLPNRISFVVVLFALAKIGAVPIMMLPAHRETELEGIIALAKPSAYIVAERYLGFYYVEMAMAMQKKFPCIQNVFVDGTQRGAWYEAETERQGVFPEVDSYSTAVLLLSGGTTGVPKLIPRTHTDYMYNARMSAKRCQLDESSVYLAALPVAHNFPLCCPGLLGTFDIGGKVVLAPTTSPDDILTAITEEKVTITALVPAMVTVCMEMLEYDEDYDISSLKILQVGGAMLEDSLADKIIEEWPCTLMQVFGTAEGLLSFTSPDDDVTVIARCQGTPVSPADEVKIVDENDEEVPTGVFGELLSRGPYTIDGYYMAEETNRTSFTEDGFYRTGDKAMWTGKGHLRMGGRIKEQINRAGEKIMPAEIEAYLCKHSDIKEAAVVGVPDETLGNRICAFILTEKGNALDVQAVHQFLKEIGVASYKLPDQVEIIEKWPLTSVGKVDKKVLVQMAQEKRGDYRDGIQMEYSEVKEQIKQKLPVQKEFGDSENLLELGLSSIVIMRLVNQWRKQGVKVAFGTLMEHPTLKEWWKIIQKGTKKKGKKAKAEKRDIIMERDMRKPFPLTDVQYAYWVGREDNQVLGGIGCHAYLEFDGYGVVPERLQEAWSRIQYHHPMLRASFSENGMQKIESKPYSEKIKINDFSLLTETEAEQEAQAVRRRLSHRKLKIEEGEVAGLELTLLPGNKTRLHIDLDLLIADVQSLQILLRDLAMVYSGVELPEESKDWNFAAYLEQQNVEDREERKKAKEYWSARLKNLPQGPDMPLAKRPEEVKNPVFHRRVVRIGKEEWDCLQRRAKEYQTTPAMLLLTAYSAILERWSKNKSFLINIPFFNRKTEYKGLEDVIADFTTLLLLEINCEGNPTFLELLDRIQKQLHEDMKYTTYSGVQVQRDLTQMYGDISAIAPIVFACNLGTELVNSTFTENFGSFSYMISQTPQVWNDFQSYEDENGVQLTWDTIDELFPEDMIDDMLTSFEQLLHNLRKEDWNQRFDVLPERQKNFVRKECTIPAASEQKVLFQEFFENVERSPERIAIIDTGKELEISYSRLKEMAQRVAAGIIKRNIKEESIAITIPRGYEQIVAVLAVLISGNVYVPVSCEQPSERRKLIHEKTDIHYVITTAEKEKQIEWPENVEIWCVEKLLENELLENYPKIYPEDSAYIIMTSGSTGQPKGVEMSHANAWNTIEYINRKYCVDQTDAILAVSALDFDLSVYDQFGLLSAGGKIILIPESESKNPDYWLKMIFEYHITRWNSVPILGEMLFECWKAQKKEKIPFRTAFYSGDWTLLYMVDMFYEAVEDGTLIVLGGTTETGIWSNEQIVKLPLPENWKTIPYGRPLENQAYRVVDDFGRDCPFWVEGELWIGGEGVGKGYRGDEVLTKQKYIMDCFGRWYRTGDNGCFWNDGTIEYRGRRDFQVKVKGHRIELGEIEAILNKIAGVKKSIVCAVEHNNRKNMLVAVVVKESPNINEEFLMQNLKSKLPVYMLPTKIIFEDKLPVGKNAKQDRKEVVRWIKAHEDRNIENEEKLTPCETRMLKIWKRLLGNDNITKKDNYFVCGGDSLLAVRMTAEIEAEFGVKVSIGIIFENNTVESLAKRISSIKEKRKPNIEVVQHNEQERFQEFLTTEMQYAYWIGRQNVYALGNVSSYCYYEIVSKNLSIERLERAWNELIIENDALRLVFSKDGKRQKVLESVPYYNLKVYNTDLDGKETVESIRDDMSQQIMEASQWPLFDIRVSICQDKNIVHVGIDNLIMDARSVLSILYQWTQRYVGNNKSKLESVSFRDYVCAMNERNMLLKDQEYWESRISHFPAYPKIPTKKMPQEITKQVFKRYTKEMTKHKWELLKKIGEKQNITASNILLTAYALMLWEESGSNHFALNITIDKRWNLSKELRHTIGDFTGNILLEIKIDEKKTFIELAHEIQNQLMKDLEHSDFSGIKFQRELSKYDGKKFRYGIPFVYTSTLGMENENDNLFGEICYNITQTPQVWLDYQIQERQGALYLNWDYLQGLLDETQIENMIYKYSNLLDWLIENGDFLISEDNNYQEGILMQELIEKINERKIKLWIGLDGELHYRAPKGALSSGLAGEIRQNKVKIVEFLKRKVCERIVEVAERNDKIRVAEAKWGEEGLLLQVEPELIRQNYKIYNLAFLNEKMSEIWKSENADIDATVLKQWIETAERVALGEMWKVMLEHDFFVAEGQHFTVEEMESKIGVADKYKRFFRRWLKIFENENFIKEEQDGFCRTSKSWKVDVAAEWDYLWGVEKQLNYGEGFVRYLEKCSKSLTQLFRNEIAPLELLFPHGEMTTAVDTYQKTLSSKILNHMAECAVLEAYSEKKGKVFRILEVGAGVGGTSDGIIERLSEQNVEYYYTDVSTYFLNKAKERYRGKNWIKYKIFDINKGGMEENKFDLIICANVLHNAKNGISVLQQLRGLINEEGLLVILDAIKEPYYLLTSIEFNDGLSDFDDFRNEDDSTFFERKQWEYMFGQVGLDIVAAYPEEGEAFFGLGQGIFVLGVQNHHMEINTKELRAYLKQQLEEYELPNEIKIVPFLNNGKLMNKLPKTKEKTVSVEQPKTELEMQLEEIWGEVLNKESIGRHENFFAIGGDSLLLSQIIAKMWDSLPETKAWSWGDLMREILETPTIAEMADKIETKEKSHEAITTLIEGTSESRIVYVIFHAGTGSLVPYLDMIKILREREFKYTILGIPCIEQDQYLQLPVEHLFVELGKKYAELLIKYKDYKLYFIGHCIGGLIAIETAKELLKQGTEVDLVTMISTNIYDGDDKKREENFQILQSNLILEKVFGRLIGADVRKSGFTITDTKLMEAIRVICQKGKFVEEKLVELTGEYQEVANMCQKLLESSHQERLRSLFSAREGKVRHAENKEDREVLFEIFKHNLLAALYYEVTDYCGNIKLLRCCNQTENFFINMIDGFSEDDMVWRKSKVKDIVTGEVQGDHISCMEFPYIKENINLIIEGIMERSLIGILGASGKVGQLVCDYLVRNTGYIVKAGYRKTIPFLFNGRLRWQFVDIQDKQKLFEFCRDCKIIINCIGSSRNINLNLAFMAHEVGAIYIDTYGTGKLKKELVNRDIVNSGCYILGAGVYPGLTGIAMNYLVKKYPSIKKWKGMAGSYEPIGAGAAEDLLYSCLYGFGIENAYWKHGQIKVPKRKEIEEIYIPQLQKTKNIALFLPDEILQIAKENDLETIRWYNILPNKEHMAIMKKAYQKLLQRNDIATEIQEFEEITRKSTEHWNIISFNSDDAEVGQILVKLEISNTSAYKMTGIVAALLAIRSAQTKRKSGIWNAYETIQMQYVFEKLQEEGVFIKETQEVSAVYEESEETGILMYVLIHGGFHNNKCWHDVEQILRKNGKKVTSVLLPGHNETDIERLKDINVTTCVESIINQIGETDEKLTLVFHSMAGIFIYDTYKKIGKEQIESIYCVACCIPAAGETMSDILKGPLHSFASFCAGKIQVVKRFPKILALAIFGNGMNKKQREKLYSSLCGESTNLLFERINECKLETSIKWILPTKDRALNPKQQRVYMNNIGNIKSIIKLTAPHDVMISHPEEVAKILLENMQNEDRQEISDTLKLLIHNNTKCQDMSGKKIYGNIQKVEKKNITGMTYQLSNETGHGEITVYRVFTGIELYYNDMHMEYCNQNQATVKNMIEINHCLIGRFECSFGENSCCYMAEGDLSISSMMKKKSNSCFPLNHYHGISIIINLDELLPEVRRIMELLNIDLHYIQKYICEGNRCCIMRANPSIEHIFSELYHVREKRKPGYMKIKMLELLLFLSDLNTAEEVLQTDYFNQNQVALIKAVASYITEDLTTHHTIEQLSQKFRISTTALKKCFRGVYGTSVYSYLRTYRLQVAQKLLLETELSVTEIASKIGYENPNKFTSAFKGMYGCSPTEFRKSVRLDRSGLYGVAKKSELYMENEKSTGNKYTVKDAAIIGIFCAVMFVVFMVYSTLTGASLFYSMIFNAAGAALILAPFYIYMCMKVGKHGPALVYNIMWAIIAGLMMGPFMIPWFLGGGIIAELSMCGKNAYHDIKRVSISWVITALVRAAHGMSEIWFFRDAFLATGVSEQQVQVQTQYYTDPKYVLLSLAVTAILAVLGCMISNKLIVKHFRKSGAIKMNMKFDFRTKLLVIVLTMSLVAVLTSDILIYTLLGVLSVYLIIQGFGRQTIKYLIVCGVFIVLRLISGGQGITILMPEMFLFMVLRILMMVMAAQPVIGMSPGEVVAVFKKIHAPDGIALPVTFMLRFFPTVRSEFADVFAALRLRKLLSWKHPLDAMEYIVTPVIFRSSRIAEELAASAESRGISNPGKHTCRRKIEFQKRDWIMSVIAVCVTALYFVLERTVAMENFKTRRSVIQFEDVSFEYPGAETESIHHIDLDVKEGEFLVLTGGSGCGKTTLTRLINGLAEQFYEGTLKGRVTLLGRSISEYPLYEIGKKVGSIFQDPRSQFFASITEDEIAFGCENYGVPYEELDGRVSNAIKRINGDMLRGKEIYPMSSGEKQKIAVASVNAVDPEIYVFDEPSANLDMYSVEALKNLMRELKEEGHTIIVAEHRLYYLTGLADRFLYMENGSIKAEWTPEELLSMPEAKRKDIGIRAADLRHIEVDIPSRKEKDVTLEVKGLAFSYRKHPVFHDISFQAYAGDLIAIIGHNGIGKTTLSNILCGMQKEKAGQILYSGKDVSKGRRKNFAYFVMQNTDCQLFGDSVEEELLLNGKGSTQEQRDDLLKMYGLFEWKERHPAILSGGQKQRLTLAVSDWIDTPILILDEPTSGLDYKNMVRISEHLKALAQKGKTILIITHDYEFAAMTCNRVLHFIDEGHAETFPLQGSLPRLYSCLMCQMEWQKQLNDFIIIGELENANPPIIAKGALLMDKQKNGELSRMFSYAGNYHVLTILGCVLSGISTIFSMLPFVCIWLVIRDLIQAFAAGDISRATESTRYAWIAVVFAAASILIYFIALNCTHLAAFRTATNMRKTAIHHIVTLPLGYFSQNASGQLRKIIDDNAGLTEGFLAHQLPDLTGAAVMPVAVIVLIFLFDWRLGICCLIPMGISVIFLKQMMGGDNAQFMGKYMTALETMNKEAVEYIRGIPVVKVFQQTIYSFKNFHAAIEEYEKFASGYALKCRIPLTGFTVTLNGTFVLLIPVVMFILSGISGQAAYENVVLDFLFYSLFTPVCATMMNRIMFASEQLMAAKSAVSRVDEILQEKPLKEPEHPMIPADASVVFSDVSFSYPGAKEKALDHISFVVPAGKTVALVGASGSGKSTAASLIPRFYDVQSGSVTIGGVDVRNIEKRELMKRVAFVFQNTRLFKDTLLNNIKAARPDATREEVMKAANEAQCKDIIDRLPDGLDTLVGTGGTYLSGGENQRIALARAILKDAPIIVLDEATAFADAENEHQIQLAFERLTQNKTVLMIAHRLSTIQDADLILVFKDGQIAERGTHEELLNLNGIYSSMWKDYQTSIAWKVGKEGEQHDMIKALKNKYALSNQGAKDLLKGIIYSVLANISLMFPVILLAIVLNQLLAPILGTTAPEISAVVYTVIGIVILAVVFIFHYCQYTATYLGTYDESARRRIGLAEKLRTLPLTFFHQRDLADLTSTIMGDCANFEHAFSHTVPQFFGAVISTGIVCIGLLIFNWQMGLALLWVAPISFAIVILSRKCQEKLSKKHMNARLELAEGIQECLETVQDIKACNQEEDYLRKLDAKMDAAEKAQISSEMTTASLLTTGQMFLRLGLATVIVVGNSLVVNGDTSLFTYILFLIAASRLYDPLSGAMANMAELFSVQLQVDRLKEIEEYPEETGEIEIHTNGYDITFDHVRFSYEKDKPVLRDVSFTAKQGQVTALVGPSGGGKSTVAKLAAKFYPLDGGRILLGGTDIAPLNSTMLMKNFSIVFQDVVLFNNTIMENIRVGKKDATDEEVIAAAKAAQCDEFISKLPDGYQTVIGENGSTLSGGECQRLSIARALLKDAPVILLDEATASLDVDNETEIQNAISKLVKGKTVLIIAHRMRTVEAADNIVVLSDGIVVENGTHEELMKENGLYHRLVDLQTASANWKLSVMKLHASGEDYLETILVLQKKLGMVRSVDVARHMGVSKPSVCVAVNTLKDGGFITMDEDHFSHLSNVGRKVAEKIYERHCFFTEMIMPKDKLSYLGNCIRQARNDCNLTQQDLADQSHVAIKTIQMIEKGKINPSYEILYPLIKRLGISANTLFNPEISDADEEIQRFIGKFQACIPENRKILLNTLDYLAEQLLTLQHNPSENLEMKLNRQEKEIVRRKFCAYCIKVLRGEALNYLDELERQRKREVNFSEILQKDLETLYCCDDYDMAENFTVMGRQVPVRDEWICKALKKLPIKKREIILMLYFLDMTEKEIAACLKLVQSTVHYHKDDSLRLMRKLMEMRSKKHREPPEFETIQAAIEGDAEAINQVLSYFQPFINSECKREYKDEFGRVHYVADEYMKRRMETKLITKILDFKIRLMDIKKLLRYTMQLAMLKQLLTKKLIDENEYSLIQKRLMKDYGIVSNITAMEIELIKANEFSEGSARKRVERLRVAAYCRVSTDDEDQIKSYNSMVRYYTDLIQNNKEWIFAGVYADKAITGTKTDKRDEFQRLIQDCMDGKIDLIIAKSIPRFARNTLDTLKYVRMLKERNIAVYFEVEKINTLKDGEFLMTILSSVAQQEVENTSAYVKKGLKMKMKRGELVGFQGCMGYDYDVATKSISINEEGAKVVRYIFERYVAGAGSTMIARELNEQGIMTIKGNPWVSSSVMGIINNEKYKGDILLGKTFTVDPISKRRLENLGEEDRYYIHDHHEPIISEEMFARAQEIRSRRNGNRKHGVTPGKREKFSRQYAFSCLLECGFCGANLSRRRWHSNSKYKKTIWQCVKATKDGKRFCPDSKGIPEQVIEEAFVESYRMLCRDNKDVLEEFLKRTEKALGENSVEDQLNKLQKKIDNLSYKRKKLLDNYLSGIVEQDIYEETDVSLKTDLSNAKAKLEYFQQQADEESSLQKRIADFKKALSHNEVLEEFDRGIFESIIEKVIVGGYDENGEKDPYKITFIYKTGFKNEIGNAKERFDKSKSVGDKAKELCSHIVNEVKDVCSYVSDNTCRDGCSFVPTKTRMKATYQEIKDYVLKEFGLKVSSLYISQVKRKCGIEVGENYNLPKSENARVPQCPNEKEDAIKAALKYYAMIMKSTFEKMGGTYTLGADGIYYPNLVSTDEEPHYGKYGMMRKTYLKEHRPAMYSMYMLEDRLTEHLNTVDDEAQERMDILVRQMMERQGITEELKACDQMEWVRAVNNVRNAAEEIVLKELIYRMAIYHMQAKVVSRGSGRSAVAASAYMSCSRMYNDYDGIQHDYTRKQGLIYQEVMLPPMAPLEWNDREQLWNAVEENEKTKDSRLAREFVVALPVELDKGSNISLLQDFIKKNFVDMGMCADFAIHDTDGHNPHAHILLTVRPLNENGTWQYKTEKEYLCIKDGEEKGFTASEFKTAQKQGWEKQYRYKVGKKKEYLTSSVAQEKGYERIDKHPKSSRYGRQNPISQQWNSDEQLCIWRANWADAVNKMLARNQINATIDHRSFADQGITEQPTIHEGYIAQNMEKKGMIADRCEINRQIRADNKMLRELKAQVAKLAQAVEKSIPIIAETLEAIRNHMIFTQYHLLHNEMQKEVIHDWMNHFNPILNKYNTVKKKLKAKVTERKELNVKKEKASIFNPIQHIKLNQQLTTVNEEIEELKSRKEQLIFQAECSTDKDMTNLSKKYDQMNNNLDILDSQDISLQKQLEKDAAAFREEKFRPEPEQYTELLDTRLQIRPAFRDKLIEQLKGTFGKYYDYHRRDIAANEVDYLNVEDPDVFSHRAWELEYQRKQEIRRNQPARTKKRSYDMELMADKKIMTPEEKALLQARHRQEEAEARNRKKERDARTHRLVQEGAILESIVPHIKEMDLDSLKRELMIRLRGMMTKFTEKATAITPNREIQPDEYFNETDHLIYCSKCNTPRQCRHELQGKVLIPSIRCKCQQEIFEQEEAQRKLHEKQMEIEHLKTSGLQDKALYDYTFARDNGINPEIKLAHNYVSNWEEMKSNASGLLIWGDVGTGKSFFAGCIANALLEKGIPVLMTNFSRILNTLTGMHFEDRNQFINSLNRYSLLIIDDLGIERNSDFALEQVFNVIDSRYRSKKPLIITTNLTLSELNNAADIAHKRIYDRILERCIPVRINNRNIRQDNATANLKQAKKILLNNHAPNQNMTDFLTADTNLPSYMMFPRFLLDMEINETAKMLYIILLDRARLSQKNEGWSDIDGHMFIYFTIEALAEVLHKSQMTVKTALAVLEKQELIFRKRQGPGQPNRIYVKLPKEAIHYTDRFLSLRQTENCPIDRQDSFPDTDRKLSGNKKEIKKNNLAIRGSKEPLSPYGKFQNVFLSEKELEDIRQTIPDWQDYIERLSGYMASTGKQYQNHAATIISWARQDHPASRQRNYESEEYETLMQNNIRNTNLRFNLDKEQQRRAWEYLQTMDRQDFKSYSQVISLALVDYFDRYYRTQADPYLETREREELFVKQIIDAVENSLKQALPLFLSGLTAGMVQREPQIRASFPAPENSLPDSDVDWDFLGEMMYNPQLDTFICVVEAGSFSKAAEELYISAPAVIKQINSLENSLNLQLFERTHRGLIITEAGKSLYQDAKYLIQYSKESLIRAQEAMNHNEEIIRVGISPMTPPEVFVELWPKIQKIYPEMKFKLITFENTPENAREILANMGKNIDVIAGIFDETMLELRGCDGTEISREPFCVAVSIHHRLAKKEKITLDDLAGENLMLMRRGWSYYGDMLRNDMMKNHPEINIVDFNLYNVEAFNRCENNNEVLLAFKSWESVHPLIRIIPVEWDYTMPFGILHSKKPSIKVKRLINAINKVKMQIKRIALGGIIMTVIMFTPTYACVGTSDGIASYRSMEKYISQIQQNGPNTKIEVFKGLSHGFGLGEGTVAEGWIDRAISFWEDNMNALDKRMKNKRFTAKILIDIGMTICLLLLMPYSLLSETAHEWIGMAMLVLFISHHILNHKWVTSVRKGKYNAFRVIQTVLVIIMLILIMGSMISGILLSNYIFKWIKISGTYMTARQIHMFCAYWGLVVMSLHLGFHWNIAVAMAGRLWEHPSVIRTWAARSVATTIAGYGLYAFYRRQIGDYLIMRMHFVFYDYEKGIFPFLLDYLAVMILIAFIGYYSGVFLKKTGKRKRKGSYMEKRKLVLTIIGVVILAMVIMVYIYFSKPGKDEKKNQQTINQVQTVQQKTNEKKENTEKNTSGDELENVTPGSEEYRGFLLDNVLHSPNEGDIHYNVYIPDAYDGTKEYALYVTLPGYQGLYFQGVGENIRTEDFGFEAQKYITDMIIVAPQLNDWGQTSADQTIELTQYFLTHYIINPSKVYINGYSGGGETLSLVLAKQPELYTAALMCSSQWDGAYEPVVEIKTPVYFVIGESDEYYGSEPFKEAYQQIHELYKEQGLSESEIDKLVVLDVEDKDYFEGTQVTYQHGGGYLFCRDKEIMGWLFNQMEYISLNNGVKMPILGYGVYQVTKEECERCVLDALKVGYRAIDTAQSYFNEEEVGNAIQKSGIPREEIFLTTKVWVEHYGYEEAKKSVLESMKKLKTDYLDLVLLHQPFSDAYGAYRALEDLYDEGKIRAIGISNFYVDRMVDFASFNRIKPMVNQVETHIFNQQKEMKEWADKYDIRLEAWAPFGEGRGGTFENPVIAEIAEKYQKTPAQVMLRWHIQRGVVVIPKSTHIERMEENFNVFDFTLSDEDMKTIAELDKKTSSFFSHQDPNMVEWFVKMVEERKKNNDSSKEKKNWMKVLLVNGSPHKNGCTYTALCEVSSALNENGISTDIFWIGNKPISGCIACRKCQEKNKCILDDIVNEFLEIAGDYDGFVFGTPVHWGGAGGAITSFMDRVFYADLNGGGDRFRLKPAAVVISARRAGTTATWDQVNKYFGLMQMPIITSRYWNMVHGTNPDEVKQDLEGMQVMQILGNNMAYFINCKNVATKMGIEMPKEPDFVFTNFIRMKTKKTAAVLLTCIMAIGLMAGCGASNTNQSASNNDSHSTSTNQSGNEEADTNSENTTDTTENTSTGNGKTLVVYYSASGNTKDVAEKIARITEADLFEIEPVEPYTDDDLDWTDDDSRVSREHDDESLRDVELVSTTVDNWDSYDTVYIGYPIWWGIAAWPVDNFVKENDFTGKTVIPFCTAATSGIGDSGNLLEEMTGTGDWKEGERFHGGASESDISSWIDSLGLMEIRILGRDLEVSEIGFGCMGMSHAYGTVSTQKEAEELIEKAIDEGCTFFDTAEIYGTTEDPHHNEKLLGKVLRPYRNKIVLASKCGIRFDETATTVNKPLIPDGRPETIKASIEGSLMRLNTDHLDLYYIHRIDMTVPIEETAGAMKELMEQGKITHWGLSEASEEIIRRAHKVCPVTAIQNRYSMMYRDYEKLFPVLEELKIGFVAFSPLANGLLTAAYHSHGEFEKPGDYRSAMPQFTEEGLKENNEFMSWMKVIAEEKNATPAQISLAWMLAKKPYIVPIPGTRKVNRLEENMESADIKLTQDEVKSIDEMLAHMPMSQVFGGSKIQKKMKTRKKITIGVIVAFLAVVMVGYIYLFTGVKISKGEMKKMLVVYYSWSNGNTKRIAEQLTNGTGADIARIETTEPYSGSHEDVVEQGKREVEAGFMPQINPISVNLADYDVIAIGTPTWWYTMAPAVLTFLTTNDFIGKTVIPFMTNGGWPGHVIKDMEENCKGAAFAHEMQIQFDSKGKDHLETSEEVITEWIGQINTDINKMRKNFGAKPFLYPQPVMILGTYDENGKANAMNAAWGGIVGANEIIVDLSAHKTTDNIIKNKAFTVGVADLEHLVACDYVGIVSANKEADKMKKAGFTTTKGEFVNAPIINELPLTLECELVKVIDGSKYLAEIKNVSADEKYLGDDGEIDLSKFTPITYDPVHHGYYRLGERVGNAFTDGAKLKMKKIVQTAGRNALNEFAPQFAHFNDDVLFGENWNNQDIDVKTRCIITVTALIASGMINTSLVHHFENAKAHGVTQKEIAAVITHIAFYAGWPKGWAAFNLAKDVWSIDEGDLSYEDEAMRAHAKKMIFPIGEPNDKFAQYFTGKSFLAPVSTSQVGIFNVTFEPGCRNNWHIHHAKSGGGQILICIAGRGYYQEEGKEAVEMKPGDCVNIPAEVKHWHGAAPDEWFSHLAIEVPGEKTSSEWCEIVTDEIYGKLKMSQPDFLYELFEDFMDDPANQDFSMDNGLVCRWMTGQAKISPKISAYYSKPSNQEKLAHTIHQNLLPLMSDCNMAIQDIYTLFIQDDSISDAKKKNLTPLYKPASSRLLFLAKLISFGMERQFIKRNTKNQKLLAGGALSPIVLDYIMDSEVPKPCRHFIGRDKELEELYTMLEENRHVFLCGIAGIGKSELAKAYAKRYIKQYTNILYVEYTGNLHQDITDMDFIDDLPESTEQERFQRHNRFLRSLKSDTLLIIDNFNVTATQDSFLSVVLKYRCQILFTTRSKLDEYCTLPLKEIENMNALFQLASVFYSEADTYRATVEKIIETVHSHTFAVELAAKLLENGISTPDQLLTRLQVEKASFHNEDKIKIIKDGQSSKATYYSHIHTLFSLYTLSLEQQDIMCNMCFLPSTGISARIFAKWLELPTLNEINDLIETGFVQTTTRRTISLHPMIQEITLSETKPSVTRCHILLDSLQHICLMHGMEVDYYKKLFQTIGNIIELIEKDDIPKYLLFLENAFPYMDNYNYHKGMNGIIQELKCLLKTKSIGTDSDRALLLDFQATLETKPEKAIKLEKDALAQIETITVDNARLVSNLHANLGGLYRMNGHPDLAREHMEKSISLLDQFNLLHINDSIPQIANYAMFLTEQQEPERGISELQKLSGIIKEYHSDHCLDYAKVQETLGTIYLMTANLPQAKTHFKRAFKIYEKIWTDEPEMIEAKYQEIQELYPQVGFFLGQQLSDFLTKQTMQQNIEFERCIDFLVRMIDKYGEEVLRELEEEKQNKEEKEAAVSMSDKYFTVNIRAYLDKDEPTYIGEESLYDLLSDFSCPKNPDVEYFLLHNAIEFTKKDQSITYLVFDAEDASLVGYFSLTIKPISVRASNISKTMAKKLSRVSILDEETQSYTTAAYLIAQLGKNYSLPKEKRIPGNILLGFALETISSLKYSVGGVMEFLECEDNEFLLSFYTQNHFKPFDTRITASQNNEPHTLHQLLKFIMATSSITHNFVVSNPNSVKRFVAAIDEADRDRTPKQTLPGRQLTNPQEILALMSKRKKKHVMKNKKIKCDIYTRVSTTMQVDGYSLDAQKEKLKRYAEFQNMEIVNEYSDEGKSGKSVEGRPEFQRMLDNIENGTDEVQFVLVFKLSRFGRNAADVLNSLQRMQDFGVNLICVEDGIDSSKDSGKLMISVLSAVAEIERENILVQTMEGRKQKAREGKWNGGFAPYGYELVNGELQIAEDEAEIIRLIYDKFIHTNMGISAIAAWLNQHGYKKKKRQNNTLDAFASSFIKGVLDNPVYCGKLAYGRRKNEKVSGTRNEYRIVKQENYMLHDGIHEGIISETDWELAHQKREKTGVKYEKTHSLDHEHILSGILRCPLCGSGMYGNVNRKKKKDGTLYKDYFYYACKHRRLVDGHKCGYRKQWSEEKINNAVEEVIRKLVKNPKFEEAILNKIGSRIDTEEIEKEIDGLEKQHRQLTGAKARLGQQMDSLDIMDKFYEKKYQDMETRLYRLYDEIEGVENSIEEVKNRLLNIQQQKISEENVYQFLLYFDKLYDKFTDLEKKEFLNSFVEQVDIYEQEQPDGRFLKHIKFRFPVYFGDRETQELCWDNESTVETVVLLSHKKPDGHINIKVEFGEGEGKVPLDNIAKRAEEYKPKERVTYKMIKEYIEAKYGFKVHTAYIAEVKRDLGLPMYDAPNAVEELKQPRKHPTAEKVEAIKDALKYFGVIMGGKEASRGFLYQGFASVLEALTDKGNWDKIYVEFPTSNDKVDIALEQQNQIVKCIQVKSTINTFTKSDIKIWLDDLIKDIESPEYELFLIGQCDKSANTFIKSIEKYYGKVLDKEAKSSLNGFDTDLLDNKRIRFFILPFEIEVLEKIVRDSLHQYISDSNQMMTFDQIRFIASATVNDQMISSTHGKGIDRKDFDEEMEKRIFLVADKYSPKRISIGVKSFTRGAENLEKDTESCLSFINKFDGRNIKGEYDWNKDIYRNLEEFLLTNTSNKYAYQIFLDTHASIAFAAGRILDSKSGINVFPIQKSSTNGTVLWDVKLSSKRNYTNWDISHEKFNENQYDSALVLNVTRNIYNDVVKFIKENNLSIGCIINCTPSDVGATNFSIEDGTHATALANSVYNAIGRRSTVERRATLHIFAAAPNAFMFFLGQNSVGFGKCILYEYDFEQRNSCTYSQSISFTNMSTVPSYFKDFLSNIRLSDNQVKDLKTGHTTLRRRLEEDETLSKIIISTFLQGSYRRSTAVKPKNGNKSDVDVIVVTKLDSEEFTPEEALDLFVPFLEKHYKDKYRIQGRSIGISLSYVDLDIVPTSAPGESETGVLQDEAIISEYTIEDFQQKLLTKSFNNDLLKSAYNIFYKSDNEPQWKSEPLLIPDREAEKWDKTHPLEQIRWTVEKNKNCNTHYINVVKALKWWRKTQYPDMKHPKSYPLEHFIGDCCPDDIKSVAEGVVLTLENIVSQYTNKPFLADRGVPEHDVFARITDEEYSDFYDTVCDAAKIAREAFDCEELYDSVCKWRELFGNEFPPAPKPSKSNSSTGFTTRTEKSAAIPEGRFAMESKQILDKLNQARRALDSLSQVEIMDEWQFDNELNVWYLHLSIVIECETPYFPQKSQWFFVVGSEYPKGKIKVYPDVENSIMVTLYHQANNSKIERNGLWRKGALCLEVNTIPNYQLEPYSVDERLLYHAKRAICWLELAAKGKLVTESEPFELPEFSMSNILEIQFAFSEDVVTFMQWESVECRYGIAELDVYKSKPFVYYVKVFKSLSNNIQHYTEWGKYLSKTTISPPIIAPWILMNQIPVVNEWQAPETFGELLVACEKQHINIMCILQNIVSKIRDGKRHLLLIGFPVPRIFGGDPEIISWKALYLPTVSYGKRTAKGFRNNQQGWWMRDRCEVFTKNAKLDWIVSENWNQHEISQRGKMSDLLLRKRILLIGAGCIGASIAEIFVRAGVYNITIADSDIFEVGNLSRHILNLNNIGEFKELSVCNYLNSLNPHANVKVINDTLSNDDSFKTNIDLDRYDVIVDCTGENNVLDILQRTNFKRTHIIASVSVGLGAKRLYVTLMNGNTFNFNAFYNLISPYLQAEKILYDDYDLPRNGIGCWHPTFPGRSDDIWIAAATSVKVIENYIISKSQKTLSLIYEQKESDGIFESYEVVEKRENGMRWWRKERMDNLLFQDKNQSYSVKFDTKAYEQMLYYCAISNPYETGGILIGNYSSNQAIANILQITSPPKNSRHSKCTFYRGIDGLKRILDLAWDQGQYYLGEWHYHPNASSAPSNIDKNQMIVLSQDQKLKCPEPILIIVGGYQDSWNINARLFVNKQEIILNKRMSNYKLYLSSEEELLRGLKQEYQSLEAEKMEEDSDIEVMEKSNCAIGCCTISMVQNMDNLLCLLEKYRCHLNRGNRSSVDFLRDNYSEYISDVKAALSPKDNQLVGAEMCKMVSEQIDTIEKNASLLIEVLELYNKGRIVLASQKAFEVFENMKPQLMQRYSGAYRQEAYFRIRSVNDNNPFALNRKELFHIPFSKNYLVGTERYSMPGHPCLYLASQAELCWYECGKPEKFALSRFDIPQSEDNYMKFIDFSEKLMPLMHSFFCWFHNEEDVEQVRKYLLKYICTYPLRAACSIVVEHPGSRFVEEYTIPQLLLQWVLNDRDFDGIRYESCNSSDEVKCLGGHNLVLVTNNFDKDGYDVNLRANIKVGEPAVFDINSININPNLKDCLMGRDIKEDPFLWGLEDSPNNFEKIMISEELKAIVDKFKEQGKMNFFDETTEEKILAFEKEKEVTLPSKYKEWMLFSDGGELFLPAGVQLYGIEHKPLIDVNDNSRPSDDYIVIGAFASGDPILCKKAEETISIYNQEVGEIDEELVYPDFVAFLNDLYELLGIGEMAKSSFVERNKAVREAWNKELELVQEGKGTREWTPEQQKDILERGRAYDEKGKAFEGQHMKSAEMYPEYQGEPGNIQFLTRAEHFEAHDGNWQNPTNWYYNPITKEKFDFGDGPFMPCEIIHLPEPIVSIQLTQENKNKESLNLVKSVNENKTEDTVEIGVSHVNTQPKNSKEANLSEVGFGQNLKRRIKTIGKSIVKFSAKHPTMTKVIKGAGIVAATIVTTKIAESTKSGEFSSKNGLSYDNENTDYTGYQADEVEQNRADLDELKADRKYVDDPIDVTEHIRNLPEGWHASEKKIASAAEHGYNLQPGQTWVANHTKNKEEMSSKVCKFFDFGVLRHDDKKCFWTDTYYSSKDEMESIYQRHGLEIVDHFAQGGLTPLLAQKVDKWNEKQFRIWCDYHYSVCREQSVLGASNHVVIIGRKMDYIKEKLYQQLAIDYCCQVSDIKDDKIILQNMKSLKAGDSLKKRMIVSMQEVVSNNLGNWFMDASNFRKLDEILKKDGYRVKTAHPFFIPKDDCVHEIKGVEIKKYNQEEILMAGAGADSPSFWQIGINVNKNFEGRHIATGLVSMLKADILKKETVPYYGTSFSNLASQHVAAKAEFEVAWVELITEKMDWMKYKGFTITVFIIASAMNVVLYVYIGNYEIINEICNYISFIAGIPALICIRKMYLDHTNEMYSYCSGLSYYFYIVHLPVVVLCQYFISLTGIGCIYNFVLSFVISVIITCGMCFTFCGGKIIFEVKMEIFWKSSFFYTQMMYKASSQEVAQEYSFEMNDYNSSNEFEIVLRIATFRHDAETLDEIMHKEVLLMQYDWIDFYTEFATKLLHFKTDRKTLIQKIYAVYDATGISVPKLESGDEIIDIDPFTIFGTFNKGITNANRIAILNGIASEFEISAMVPSNFDGIPVLNNLKATFYGFKDDRKANDIDNLWSLFEVALALADNDTEDNRQKFSNAYDKVHDQLCIRWNITMALYWIRPYTFINLDSRNRWFISNAQNMPGEFVVAAEKKLKKVPYAADYLEIKDLCKKVLEAGQYEYKSFPDLSYMAWVISEKVNQEKSIEKGKKTSKAEFLKWFMPLLQALRDLGGSATPVEARKKIIENEHLSDDVINETRGKTKVNKFENEVAFARNYLVGAGYIDKSVRGVWTLTEAGKSVELTAEMASDIFKKGVSDAKSKKTNDSDALADSDVDTIHYWIYAPGQNADKWEECYKNGYMLLGWGEIGDLGIFSSKDEMKQQMKQEYGDSSSYKNSAHATWQFVHDIKVGDIIFAKKGNNGILGKGIVESDYEYDADRTDEYSNVRKVNWINKGNWTINHQAPQKTLTDITPYSDFVQEIKDLFEDDDMVDDEQELTYPEYTAENFLEDVYMSEEDYSRLVGLLRNKKNIILQGAPGVGKTYAAKRLAYSMMGVKDIERVMMVQFHQSYSYEDFIMGFRPSSTGFELKKGAFYNFCKKAEIDSDNEYFFIIDEINRGNLSKIFGELFMLIENDKRGNALQLLYSDEKFAVPENVYIIGMMNTADRSLAMLDYALRRRFAFFDIKPGFETPGFREYRMALDNEKFNKLISCVENLNGVIASDESLGEGFCIGHSYFCNLQPDTINDSWLYGVVEYELIPLLKEYWFDEPMKVKDWSENLRSTIKMIPIQNVYYMLSYAFQVLNEQGYKNIATEQFHNTAELMAAILEKGIAIQLKRGLGKEYIPQTEALSSLRGKIDIAESIKTQSTLRKQLICTYDEFSVNSIMNRIIKSTVEILLRSNISKQRKKNLRKLMLYFSEVDFIDLYTVNWNVQYNRNNQTYRMLISICYLVVKGLLQTQSDGSTKLMDFLDEQRMCRLYEKFILEYYRREFKNQITANASQIPWQLDNDENSMLPVMQSDIMLQRDDRVLIIDAKYYEHSMQVQFNKHTLHSANLYQIFTYVKNKEYELREKEHTVSGMLLYAKTDEEIYPNNVYQMSGNQITVRTLDLNLPFTEIAEQLDTIAKLHFSLMRYEDENIWLTQRMMATLYDVVLPTINEHIKKIYADSELEETATIRNFRIVQTEGSRQVTRDTKHYSLQMIIAVGFKVNSERAVQFRKWVNQIAKDYTIKGWVMDDERLKRGAYLTEKYFDEQLERIREIRASERKFYQKITDLYATAIDYDKRSMWLNIMPELKHFKMNSMPCILVVEDDENLNRGITFSLKKSGYEVFSAESVKKAKRIASDNNVDVTICDVNLPDGNGLEFVRWMRCNYNTYIICLTALDQEMDQVMGYEAGADDYITKPFSLSVLLLKIEAHFRRRQEKTEAGKMISGDIVFIAGEMKVLIKSREISLTKTELKMLTFFLQNPKQILSKTQILENVFDLEGDFVDENTIAVNIRRLREKIEDNPAAPVYIKNIRGLGYIWNQEVRQMTKRYRKKITVVLSLVLPVILLFAILNCFTTYVFYEDYKYKMNLMTEIAAKEEFSGLDAVSELLKDKDIETNEQGRRLLEQYGYWGNKGNAFYMQFRHQVMVTGAVSTVICVLLLTFLLYWKKKEDACHQKILDQLEEILIRFRENKFDALLKTENPAELEKLNDQLEAIGHHIQLLKEEARTEKENTKEMVSDISHQLKTPVAALDTCFSVLMQNDLSATEQEEFRIRCRSALDGLETLLQSLLEISKMETGLIQINKKKLPLMDTVISAVNCTYPKADEKEIEFVFDYEKELETCTIMQDKRWLGEAVINVLDNAIKYSPDGSKIFIRLQKRNDLVRMEIEDQGIGIPQNEYHKIFQRFYRGSSGEVMEKSGTGIGLFLSREIIEKHGGTITVTSGKKKKGSTFVIQLPYVGMSVILETKQLCKFYGAGENQVKAVNQVDIQIEQGEFVAIVGKSGSGKSTLLHMLGGLDTPTKGSVTLAGKDLYRMKEDALAVFRRRKIGFIFQAFNLVSSVNVWENIVLPLGLDGRKVDEAYVNDIIATLGIENRIYNLPNQLSGGQQQRVAIARALVNRPEIIFADEPTGNLDSKTSDEVIALLKMTAKKYGQTIVMITHDDEIAQVADRILVIEDGQVVDFRMKTVSRIAYSNDKNNRTRSILIMMSICLTTMLLVIISTVGNGMIRLQKSQAAGSYGSNYGLFVAADAPQLKEVSRRAEIDATGTMCTEGIIKGNENGGFVCMDETARKMLPYNKEYELKEGKYPGGTQEIAAGKAFFSEMGYDDVKVGDTVTLDYRAGMQSEYKPEEFVVSGILYDRDEYTIEASYVAFGSQEFYDEHVAENDRQYNIYFTLNDSANVSMNNIDSVIKQMAAACGIEEKNVIVNDLYLQWVLQPSYETIAVCGVLILAIVLFSVVVIYNIFQVGIANKVQEYGKIKALGATKKQMKQLIFREGIFLTFFSIPVGLLFGFLIAKCGFNWLVEQGNLVSTQTGSMGVQNQQVPLFSLPVMLLCIFVSFLTVALALRKPMKIVSRISPIEATRYLENAETHKKGKRNGRKNVTVFSMAMANVTGNPKRTIGTILTMGFSCVLFVIISNYVGNIDTEHEARLSVNHGQFELQLDYSAEYDERYPENNLDTILTDDPLNDSLIEEIKSIPGVTDVMTRECVSVNLNGTRFPADIVSKKDFDFMRQDGDIGSMDYDQAVKNGDIFFGWSTWMEQDGYAPGESIAFDFENGSGTYTYQGKIAGSFVSADTYLVIPEGVYRSMNLRGTAYGYLWVDCDKKDVASVEQSLNTLISNTSHIKMDTYHAQLQSAEFASSMMKLGCYLFMAIVGLIGFMNMANTMIMNITTKKQEYGILQAVGMTNKQLNLCLQLQGLIFTVGTICVALIIGLPLGYALFSYAKHNGIFGMNIYHVPIVPILIMILLIGLLQIVLSCVLSSNLKKETLVERIRYQGMPTVLANVNDLLEKGVLEENGEYASTGGRKAKSIGINKSYCHAMGILITANHIEMVLVNLGDEIIKKDRIRLKFTAELSYCTEVAQKVKTFLEGELAKDTLLGIGVAIPGIIDQKERIVLKSHALGIENYSLRFLEQALEIPVYFENDANAAMLAERKQKYPNAIYLSLNHTLGGAFCIDGKLFRGQNQKAGEFGHMILVPGGRKCYCGKSGCADAYCAASVLTQDNRQSLDAFMEKIESGDEKVLQTWNEYLDHLAVLISNLRMAYDMDIILGGDVGGVLSDYMIPLGEKVMAYNGFEHDVSYLKNCSYKKEASAVGAAKYFFTKHMGELMLQQVMTNPGEIIFREVPVPEVKENQVLVKIMNIGICGSDIHVYHGKHPFTKYPVTQGHEVSGEITELGKNVTEFHVGQKVTIEPQVYCGHCYPCRHGKYNLCEELKVMGFQTTGTASEYFAVDASKVTPIPEDMSYEEGAMIEPLAVAVHGVKQMGDVAGMNIAVLGAGPIGNLVAQTAIGMGAAKVMITDISDLRLAKAKECGIDVCVNTKNKDFGEAMIEAFGPDKADVIYDCAGNNITMGQAIKYARKGSTIVLVAVFAGMAEVDLAVANDHELDIKSTMMYRHDDYIDGIRLVNEGKVHLKPLISKTFAFKDYLKAYQYIDDNRETTMKVIINVNEKMENKNGKVPLISKIAYGFGDVGCNFSWMFVSNFLMIFYTDVFGISMAAVSALMLFSRFWDAINDPIVGGLTDKTKSKWGRYRPWLLVAAPITAILLVMTFWARPDWPQNGKIIYMVITYCLLVLGYTCVNIPYGTLCGAMTQDIDERAKINTSRSVAAMIAIGVLNIITVPLLSKFGSHSAKTGYLTVAVIYGCIFTACHFFCFAKTKEAVIIPEKEKISVKIQLKAVMQNRPYLLALAGQILFGFTLYGRNADILYYFTYVEGNASYYTTYSMCIIIPSIIGAACFQPLFRKLNNKGRTASLFALFTGISMLSMFFFNAKESPAIFYALSGLTQFFFSGFNTAIYAIIPDCVEYGEWKTGLRNDGFQYAFISLGNKIGMAVGTALLAGLLGKCGYIANQTQNATVLSIMKHAFTTIPGALWIVTAVVLFFYRLNKKRYNEIVEELKNGRKSMEEKVDIVALGELLIDFTEAGHSQGGRKLFEQNPGGAPANLLTVASHFGYRTSFIGKVGNDMHGKFLKKTLQTEGINTDAIVEDPDYFTTLAFVEIGENGERNFSFARKPGADTQLKKEELDQTLISGCRIFHFGSLSLTDEPAESATIEAVKMAKAAGVLISYDPNYRPSLWKSKEYAVKKMKSVVELVDVMKVSDEESILLTGAKSYEQAAEEILAMGPRLVAITLGEHGVLMATKSRKEIIKAFQTHAVDTTGAGDSFWGGVLCSILSINKPVEKMEWEEIRKCAVLGNAVAGLCVQKRGGIPAIPTKEAVFEFMQKMNKKKELLVQIMWELAGSIFYAIGIYNFALQAEFPMTGFSGISIILYRLFNISIGLSTVLLNIPVAILCCKLLGRKFFVSSIRCMLLSSFIVDYVAPLFPVYQGDRLLAALCTGVFCGIGYAMIYTRNSSTGGADFIIMAVKALRPHLSMGNISFLTDVGIILVGGLLFRDIDGMIYGMIVNILSAVVIDKMIYGMNSGKVAFIVTKNGKRICDVIDECSQRGSTILKAQGGYKQDDIQVVMCACNSKEMYQVRKSVKDADPDSFIVVVESHEVHGEGFKMTNIGEAENMLENWIKPQIPEEEELDERLHAARSKLSVLQMQIKEHGLPVLVLFEGWGTAGKGSVLGKVIKNIDPRFFKVATMDEPTEEERRKPFLYRYFVKIPAKGKFEFLDSGWMDEVVKDVLHDKIGEKEYKKKIESVKRFERQLTDNGYLVMKFFFQISRKEQKKRIEVLKENKDTRWRVSGDEDWQNKHYDKCMHVFDRYLNDTNSPADPWYIVDAKNRKWAELQVLETLVSGIETALKNSNLAVPLLQNVFPLEKIPKLSEISLDKELSEEEYKKELKNLQSKLSELHNKLYRRKIPVVIAYEGWDAAGKGGNIKRITGALDPRGFEVHPIASPLPNEKARHYLWRFWNRLPKTGHIAIFDRTWYGRVMVERLEGFCSENEWQRAYNEINEFEKELSDWGAVIIKFWVQIDKDTQLARFEERQNTPEKQWKITDEDWRNREKWDLYETAVNEMLKKTNTTYAPWHVLESNDKKYARIKALKIVIDAIEAALDKMIKLIATDIDGTLVKDGSLLIDPEYMSVIDRLIDKGIIFVVCSGRQFSSEFKLFAPIKHKLLYITDGGTVVRTPKEILKTYPMDEDIWKGMCRMVRDELPACDYFAATPDFCFAEDGGSPIFHLLRDSYGFEMREVDDITRLDRNDIIKFTVFHPDKCEELCTPVFIPAWNKKAHLAAAGKEWVDCNAKGVSKWTALSYLIDRFDLLPDEVCCFGDNLNDIEMLQNAGMSYAVSNARQEVIAAAKHTCAPYWENGVLSVLKSFLMIVALIEKVYSFLWGDLIHIPLPGGGSVGISLLIILLIPTGIYFTVRTRLLPIRMFPDMIKALTGKKENKDSLSTFQTLIVSTATRVGMGNLVGVVAAISVGGAGAVFWMWITAIIGSSTAFVEATLAQLHKEPDPLYSGYRGGPAYYIHHYFEDKSGKKKKHVIIAVLFAISGLICWCGISQVISNSVTSSFENAFGIPPIYTTVILVAVAAVIVLRKNATVKVLDIVVPIMAVCYFAITIFIIIKNIGMMPSVFSRIFEEAFGIRQVAAGGFGAVLMNGVKRGLFSNEAGSGSAPCAAAAAECDTPVKAGLTQALGVFIDTIVICSCTAMIMLTAPENIVAGKEGMDLLQSAMRYHLGDFGVIFIAVTLFLFSFSTFLGILFYARSNVAYLFGDNWISQTMYKVLALVMLFVGGIAAYTFVWDLGDVGIGLMTIFNTGILYLMGGQAIKELRVFEESNKAQSNSQCSQQGDNVMQMKRESFKSRLGFILVSAGCAIGIGNVWRFPYVTGQNGGGIFVLFYLIFLVCMGLPVLTMELAVGRASRKSAVMSYKALEKEGSKWHIHGWIAMLGCYMLMMYYTTVSGWMVAYFFKFLKGDFTSGMNTDDTAAAFGNMLADPKQMAFWMIVTVVLGFLVCSRGLQNGLEKISKFMMSALLLLIIVLAVHSITLSGALEGVKFYLVPNLDAVSEIGIKNVITAAMNQAFFTLSLGVAAMEIFGSYMGKDCTLAGEGAKICALDTFVAIMSGLIIFPACFSYGVEVDAGPSLIFITLPNVFVNMQGGRIWGCLFFLFMTFASFSTVIAVFENIMSFAIDMFGWSRNKAALINGVIILIASMPCVLGYNVWSNLHLIGGRDVLDSEDFMVSNLLLPIGSLVYLLFCVTKWGWGFDKYIDEANTGAGLKISRKLKPYFQFILPLLILFIFIQGLIMLDQNTFIETVQSVAEIIRTSAEPIGRDEIMSYFKDMELNKAQEDMVFEFLITPHEQENESAGDYEDESHEDELHGDESSENAALNNVIYSEGDSMDAIAGGKNNKAKQDNEAEPDIDEDSLIPDSPMFRMYLEELEEIPDYTKAEQDDMYKKLLAGDESVIHTISNFWLKSVLAMAKKLAVTSEGFEDVVQEGNMGLFMCLTELCGCGDEIDVEKELLDAIEESMKECIREQTGEDESENTVVGKVSLVNRAVEKLKSDKGFEPSLSELSGYTGVDEEELEKLLELIKKADVEKNKQDSKMARFTNQAQLRYGNNVANSNIAVGEILEVLSATKTAVKNTYNQNDTITYVVSIVNSGNTAINGLTLSDNLGAYTFNTNTLVPLTYVNNTAKYYTNGTLQAAPAVTQGPPLSITGINVPAGGNATVIYEAALNEYAPLGIEAAVTNTATVSGTGITPVTAAETVNAEAAPNLAITKSVSPVPVTENGTLTYTFRIQNYGSVAATNTTGVVITDTFAPVLNNLTAALNGTAWTAATDYTYNEATGTFSSTAGAITVPAATYTQDSTTGAWVVTPGESTLVITGTVMNNAQLVIDEVKKAVKGKDDCIIKAFAAFLAGGHILLEDVPGVGKTTLAVAFSRAMALVNHRVQFTPDVLPADILGFSMYQKQTGEFVYHEGAVMCNLFLADEINRTSPKTQSALLEVMEEGNVTVDGISRKVPEPFIVMATQNPKGSAGTQLLPESQLDRFMICMSMGYPSHEAEMDIAKGKSVKADEYTIKPVMNAQGLVEMQGEVEQVFIHDSIYSYIVDLVDATRTSPYIELGVSPRGTIACVRMAKAYAYLSGRSYVIPSDVVSVFADVTKHRIVLNTKARVSHVSELSVIDEILKVVKQPTTYVKKAGNRDMISFLIGIITAAIVFYMSMIYGNAALALLGCFMCVFMVLTFVALLVKAHRAVAAINIPIAIATQGESIRVSLSCRLKEAGFDGVKYRVTVKNNLSGEKSTKWLSGGSDFLYSVNLCGNYEFELVRIKLYDFSRLFYVTKRVKKYANVEVMPQIDEIPVRITDRVRNFFGDSDIYDDLRPGYDPSELFDVREFQNGDRLQSVHWKLSARTDELMVKENSLPKACAVAIVADLRGIKKGRQADAFMKLLVSLSFSLMDQKCSHYVAWYDTAINDIVRARVDDEEGFYIFLNSFLKIKPDKKNDALFLYEEKYRAEKLVCLLSVDGRLQIKRGEEIVGRADEKNEIVIMAERMKKTRLSFRKSRWQKSDANEIKPDYNNAFTVLGVLLTELVNAAAAVLLTVCAVSVVNTTVSHVRCPYYVYVWLFIFSVISGFINRLTSLDTRKWVRHAINTGLLLVFLLGVFIANWQAAEHIKDGFLYVKGRYLELINVYYGTSFVCPKGDKAFAGAFVGFVSFIVMLLLVTLAVQIKRRRMLTLFPTLMLVVQLCIGKSPSVSEVVMLTLCTLWCLIADGNARTVAGYDANGSAQGNEALRIAAVFLYMAAVSAVLFICVFSFKPLADTLADKKPQMLAFQKDLEGSVKSFFSVGIDLQDGTVSNHYPSYSEKTVMTVEAKAGVPSNIYLRSFYGDTYENGRWIKKSDFSGMEKEYHDASRMTAWQTTIGLATLLDGYYDDETNPATEKYTITMEKLSTKYTYLPYCIDPYSIDAKGDIDFDEDFFITKDKGTKTIEVSACPGFFDGSLEMSILEPEQPLEVNNDFYVAYNDYVMENYTEKQGGDGIVAKDAKLLLRTGQLTSNMMYTGDIRENDANRIAAAQLVQQFLTSKDFKYSKNPPSTGGKDVVDNFLSNSRQGFCVHFASAGTMILRQMGVPCRYVSGYCAKEDSFKSGENDEDICEVKDSQSHAWVEIYLDDFGWIPVEMTPGYFEYVTGENPFDYIGVKGKKTNAGDALDDTENMNDAAANEDNAYEDAADQDAENENTDVKNDGTANDTTANTASNQYESGDGSENAYGSQSGADKRTAAQNSKTRLHIPPVILKTSLCVIFLTALTAIIVYIKRRRNILWEARLAKRVKKGRYSRAAIMINNRIYKGLGHTSKNRTDELYLANLKEKYCGPDYCGIHWDEYMRIIQKAVYSSEGITGEECFMVMETWRRLEKKDIRHNSQKNMYKNSMINKKMKDKIFGVLQRVGRSFMLPIAILPVAGLLLGLGSSFTNTTTIETYGLQWLLGDKTILHALLVIMNAVGSAIFDNLPLIFAVGVAIGMAKKEKEVSALSAVIAYFVMNVSINAMLKISGKILADGSIAKDVLDGTITSVCGIQSLQMGVFGGIIVGLGVAALHNRFYKIELPNALSFFGGTRFVPIISTVVYLFVGILMYFIWPTVQNGIYALGGVVTGTGYFGTLLFGIIKRALIPFGLHHVFYMPFWQTAVGGTMEVAGHMVEGGQNIFFAQLADSANITHFSADATRYFSGEFIFMIFGLPGAALAMYKCAKPEKKKQAGSLLLSATLACMFTGITEPLEFSFLFVAPALFAVQVVLAGSAYMIAHILNIAVGLTFSGGLLDFFLFGILQGNEKTSWMLVIPVGIVYFLLYYFIFSFLIKKFDFKTPGREDDDTETKLYTKADVNERKAAKDVKNSDEKAGSVADELSQTISRGLGGKANISDVDCCATRLRITVIDPDKVNDALLKSTGASGVVHKGQGVQIIYGPRVTVIKSDLEDYLASVTEEHFEDDAAENNTADEDEAKNENAASDKAQESDVKAEKEAGDVKEPTSTVIISSPMTGIAADLSTAPDEAFASKMMGDGAVVTPEEGVVVAPEDGTVLFVFDTKHALGFTTDSGIGMIIHVGIDTVKLEGKGFDVQVEAGCHVNKGDVLMKLDLDYLKANAPSVTTPVICTELKDNQKIRLITDGPIKAGEPLYAVDTYEKMYRITKVLNHNTVLAVKDKSAREYLIVGKGVGFGKKITQSVEPTEEDSLYELTQTRDRGPAKDIVKSIEPEYLEIANTLLDNAEHEFGHIDRSILFPMADHIAFAVKRMENKEQISNPLNDDIRVMFYREYKIAENIRHILKDKKQIDIIDDEIGYITLHIHTSLNNSKVSDAMEMAAAVRKCATFIEEKIGKHIDVTTMAYNRLMNHIRHMVSRAATGEKLKVDLNQFIEKNYPESFALAGDICKELGKDLNHQFLDNETGYLAIHIEQIKCDEMVSEMKLGIVGLPNVGKSTLFNSLTKAGALSANYPFATIDPNIGIVSVPDERIVKLGELYHTKKVTPATIEFVDIAGLVKGASKGEGLGNQFLANIREVDAIVHVVRCFEDTNIIHVDGSVDPARDIETINLELIFSDVEILDRRIAKIAKQARMDKTLAKELELVEAVKAHLEDGKMARTFEVPDDEDAQLWFKGYNLLTAKPTIYAANVSEDDLADDGASNPHVAKVREMAKEEGAEVFVICAQIEQELADLDEDEKKEYLEDLGVESSGLDKLVAASYSLLGLISFLTAGEDECRAWTIKKGTKAPQAAGKIHTDFERGFIKAEVVNYQDLLDNGSLAAAREKGIVGMEGKEYVVKDGDVILFRFNVMRFLDLCEKEVVSVEEGRFIGHVRDLEFDPVCGKICAIIVPGPGKYMGIFCRDYEYCIPWVKIVKIGPDIILVNICESDMRRKLLMKCPFCSSDNTRVIDSRPADDNSSIRRRRLCDDCGKRFTTYEKVETIPLIVIKKDNNREQYDRSKIEKGVLLACHKRPISADTISKLVDEVEIEIFAREEKEISTSLIGELIMDKLKELDAVAYVRFASVYREFKDVNTFMTELKKMLDTKMSFLYPGEYIDSTYSIDFDKLYKEGYRGIIFDIDNTLVTHGSPADERAIALFKHLKELGFSCLVLSNNKEPRVKSFAKQVGIKYIYKAGKPKPSGYRTAMERLGTDTKNTLFVGDQIFTDIIGANLTGIRSILVAPIDPHEEIQIVLKRFIEKPVIACYKRHLKKVNKMKIAIGNDHAAVELKKTIMEYVESMGHEVTNFGTDSSESCNYPEYGEKVANAVASGEFDCGILICGTGVGISIAANKVNGIRAAVCSDTATARLVKQHNNANIIAFGERIVGVELAKDIVKAYLTAEFEGGRHAKRIAMISDIEARNMISAGDFRNGVTIEFEGNIYQIIEFQHVKPGKGAAFVRTKLKNIISGGVVEKTFRPTEKCPTAHIDRKDMQYLYADDDFYHFMDVETYDQIDLPKDEVGDALKFVKENEMCKVCSHKGNVFAVEPPLFVELTVTETEPGFKGDTATGATKPATVETGATVYVPLFVETDDVIKIDTRTGEYLSRVMTGDFLIVKKYLSNPLVTGTIFLTLAGTTSRFMGFFFRIFLNNVMGSTGLGLYQLVIPLMSVCMSLCCNGFQTATSKLVAEKPQNRQIILICAIIMSATIALLLTIIMYSNANYISICILSEPRCTELVKALSFSILPAAIHSCINGYYYGLKKAAIPAATQLIEQTARIGTCYLIYAILSDGGSCFKPVYSIYGIVAGEASATVFSVITIKKDFSYFKISVKSLKTTAYGMAALFIPLSLNYILASFSSSAENVLIPRTLKLYGLSPALALDIFGTISGLTLPVLLFPGVLCSCACVMLLPSVSEANAAGKDAKITKTINSCALFGLCFGLIFTCIFYLLSDFIGDFLFSSKLCGYFLRRLCFLCPLMHISGMLCSILHGLGKAKQVLFVNLLTCAIRILMIMLLVPHYGIDAYLWAMLVSHVFMTLAVRILTCHTAHKMKLIALDLDGTLFNNKSQISKENIKAIKEATAAGINVVISTGRPFGGLPFEAIKGTGIRYAITANGSAIYEIDTQKCLYENCLSDETAFSIIDYLMTKRVHMDAFINGCGYSPYKCLEDAKDLKIPPSIKEYIMTTRKRVNDITEMMRENNYHMQKMTINFPKDVNDNYYCRDEVFEHLKKIPEITLVSGGYGNLEFTKAGVDKGVALHKLAQILNIAADETMAVGDTENDMAIVKAAHIGVAMGNATDELKAQADYVTDTNENDGVAKAIRHFMGMTREEFRKYIRENIVILDGATGTNLMAAGMPVGVCPEEWVMEHPQVILDLQKAYVDNGTNIVYAPTFTGNRIKLLEYGLQEKINEINTTLVGLSKQAVGDRALVAADMTMTGRQLFPLGDLMFEELLEVYKEQARILDEAGADVFVVETMMSLQECRAAVLAIKEVSDLPIMVTLTYNEDGRTLFGTPPETAVVVLQSLGVDAIGVNCSTGPAEMIALVEKMAEYSTVPLIAKPNAGLPELEDGKTVYKMTPDMFADAMRGLVKAGASIVGGCCGTTPEHIRALTEAVKTMPVHKPLEHHRRVLASERKNVEIDLDGNFTVVGERINPTGKKKLQAQLREGKLDLVRQMAMEQETNGAGILDINMGMNGIDEKEMMKSVIYEVSSTVDCPLCIDSSYVEVIEEALKIYPGRALINSISLETEKMEKLLPLAAKYGAMFILLPLSDAGLPKDVEEKKQIINTIYDKALSLGMAHEDIVVDGLVATIGANPKAAIECYETIAYCKDEKKLPTICGLSNISFGLPERMYVNTAFLTMAICKGLTMAIANPSQELLMNAAFASDMLLDRPDSDIAYIERMSRLAEEKAQYETVVVKKSDNDASASNGTCAAGSKDAVFQAVLKGNKGSIIDEVKKMLSDSAKPDEIINNSLIPAINEVGELFNQKKYFLPQLIGSANTMKLAIEHLEPLLEKKDSGDDMPTLVIATVEGDIHDIGKNLVVLMLKNYGYNVIDMGKDVPCEDIVNKAIETNAAVIGLSALMTTTMMRMKDVVEICKEKGCKSKVVIGGACITQSFADEIGADGYSKDAAECVKLVERLLNSMIRPKIGLDWDDVTAPFNSIAIDMANKKYNITPPLALDDIDSWENTGRASVIKEFYRDNTLYERQKPTEETKRMIRKLMDIGEVYFITAVAPGFMGVRASQIMEAFPDFPTENIILGNAKNLVQFDIILDDAIHNVLETPATYPVLMRKPWNSKMTGLLSVNNITEFVYLVEQIINASLYRNKNIKNPSVVALVGPSGSGKTALSDSLCAMEQFENPKTYCTKPGDKHRYLTEEEFNAQDFFEKTRYAGIQYGTKMEDIEAVLAKGHFVVMPLDMCGAIAMKRHFPTVIVYVARDKELLIRDIIEQDYSIEEKTLRILSIDAEKRNRQICDYAVNNMDVGAATRELSDVLENNCLMSKKHYADRNLKFETLQLHVGQETPDPVTDARAVPIYLTSSYVFHNSEHAADRFGLRDAGNIYGRLTNPTEDVFERRIAALEGGVAALAVGSGAAALTYAFQAVAHAGDHIVAAKNIYGGTYNLLAHTLPDYGIEATFVDPFDYDGIKAAIKENTKAIEIETLGNPNSEVVDIEKIANIAHEAGIPLIVDNTFATPYLVRPIEYGADIVVHSATKFIGGHGTTIGGVIIDSGKFDWTQNDKWPWLVEPNVSYHGVSFAKDCAPAAFATYIRAILLRDTGATISPVHSFIFLQGLETLSLRVERHVENALKVVQYLKDQPLVEKVNHPSISEDKEQQELYKKYFPNGGGSIFTFEIKGGAKEAQKFIDNLELFSLLANVADVKSLAIHPASTTHSECNEAELLDQGIKPNTIRLSIGTENVDDIIEDLDEAFKALAEMFGFGQLIEILKKDPKKIVFTEGEDPRILEAASRLLASNFLHPILVGDPEKISASAEKSGFNIRGAEIIDPMNFDRMDEMVELFCELRKSKGVTPEQAKGILSSANYFGTMLVKMGIADSLLGGATYSTADTVRPALQLIKTKPGNTIVSSCFILVRPSATGENEVLAMSDCAINIHPTEDELVEIAGESAECAKIFGIDPKVAFLSYSTLGSGKGEDVDKMRNAAHKAREKYPNLPIEGEIQFDAAVAPRVARTKCPQSEVAGHANTFIFPDINAGNIGYKIAQRLGNFEAYGPILLGLNAPINDLSRGCNAGEVYSMAIITAALAMRVGMGYDVHKLVEGRDLILGGVKVPHTLGLLGHSDADVLLHAIMDALLGAAALGDIGKHFPDTDTAYEGISSLKLLEHVRDLIEKKGYVIENIDATVIAQKPKLRPYIEQMEQNVADTLQIAKEQVNIKATTEEWLGFTGREEGIASQAICSLTGLYEASMQVGGGCSGCTGCQADMENNFKFYNTLTRQIDTVVPRVDGKIGMYTCGPTVYHFAHIGNIRSYIMEDVLEKALRYVGYDVKRVMNITDVGHLSSDGDTGEDKMLKGAKREHKSVMEVAKEYTDAFFKDFTAVHNRMPDVVEPATNCIPEFIHMVEVLIEKGYAYFAGGNVYFDTSKLDDYFVFSSAVEKEQLQVGVRDDVEEDVNKKNKNDFVLWFTQSKFEDQALKWDSPWGVGYPGWHIECSCISMKHLGEYVDIHCGGVDNIFPHHTNEIAQSESYLGHDWCKYWFHVNHLNDRAGKMSKSKGAILTVSVLQEKGYNPLAYRFFCLQSHYRKPLEFSFDALDNAVAAYNKIAKRVAELKDEGDIDEAAFADFKKKFTDAVSNDLNTSMAITIVYDVLKADISDRTKLALIDDFEQVLDLGLRESGKALLEASSSVDSELETFINDKIAERAAAKKAKDFATADAIRDELLAKGVAIKDTREGVKWELVMKIDSYIKEQFGIKHVDIRTYSPLTLAYIGDGIFDIVIRSVVVGKGNTKANLLHKHTSNIVKAHTQALMIEALLPHLTEEESDVYHRGRNAKSPSMAKNATMADYRKATGLEAVMGYLYLKDDFERVVSLTKLGVELLGIEIMDNNNKEKFHENYIEGRNAVLEAFRSGKTIDKLFVLDGCQDGPIKSITREARKHDAIINYVAKERLDQMSETGKHQGVIAVSAAYEYAEVSDILENAERKGEPPFIIILDGIEDPHNLGAIIRTANQAGAHGIIIPKRRAVGLTPTVAKTSAGAINYTPVAKVTNISNTIKELKEKGMWFVCADMGGTTMYDLNLTGPIGLVIGNEGDGVSKLVKENCDMTASIPMVGDIDSLNASVATGVLAYEIVRQRIKSGKMEDYSAYTDEELIMRIHNDKNDHGDNNEIMDYILEKYKPLVRKKTNALYLIGGENDDLIQEGMIGLFKAVRDYKSDKEASFYSFAQLCITRQLSSALEASNRKKHMPLNTYISFSQSDSDGTEFEEILQDDIASPEQLLIEKEKFKEFKEQLWNKLSNMEKKVLQLYLEGNNYTSIARMLGKSDKSIDNALSRIRQKLKRKMEFSRIGEHTIKCVISEEEIYDLGYTMDEIMSNGERTQEFMNQIFDMASEEFGTDFNSGIKTVRADFLADHTLSLTFSEHPATEGMMEHLKDIVNGLLNSLPAEAAENEKNKKGRTTAKKQDMVSVVMFIFEKFDVAVRFAKMIKGLPMPFSQLFKFEGEYFMSMDLSGYDEHELEKMSVIADEYADDIIAGADKRAFLMEHAKVILDDKAIESLAQLMTFRLTVGDLIDNEAVAKYNELKLDNIYIQNKVCQYSMGETEYSEALKLGKKEYRARIAKGQFPYLPVLDEILSEADIKTEQNMGLVQVPLDFVVGTSTMGRTYSFAANFMPILDEETEFAVKWSNLSDAQMNEGIRDPIKAFEYMNRYYVLEGNKRVSVLKYFNAVAIPAIVTRKIPKLSDDYDVRLYYEYMKFNEITGLCSVEFTKLGNADKLLSLVGKEGRWDDETKEKFAKVMFDFSKVYNFRGGDRLDIKLGDAITVFMEVFGMDAMLEMSENDYNKNIINTWKEFAAEGEKHKINLVLDPKKVQTKKSLLNYLIPQTQKKLKVVFLYPREPKTSAWLYSHELGRMYLDETFPDKLETEYVAGVDENNVEQVLEDIIKAGADIVFCVGPQMMPNSLKVAVAHPEVYILNCSLNAPHPYIRTYYGRMYEAKFLAGMIAGAVTDNERVAYIADYPIYGMIANINAFALGVASVNPRAKVYLAWSKTKDYDRDKFLTENDLHYVSDQDIITPNDASRYFGLYKIQGDQTLNLAMPIWNWGVFYEKLLQSVLAGSYKAEGQEQVKALNYWWGMSAGVIDLICSKHVPYGVKRLADHLKSDITKGEIVPFFGQIYNQKGELKNKGEHEMKPSDIMKMDWLVDNVVGSIPPMSEFIDNAKMVVELKGVEGNKLMYWEYFKKEDFKGIDIIVSCGDLNPSYLSFLTTMVGVPLLYVHGNHDDKYNVKPPEGCICIEDEIYEYEGVRFLGLGGSNRYKPGENQYTQKQMTKRVKKLRWKLKRKNGFDVLVTHSPAKGLHDGEDVCHTGFDVFNRLIEQYKPRYFVHGHVHMSYGRQFVRLDKVGETTVINAYEKYIVEIMKKTPFVTKQQVEEIVKKFPTPFHLYDEAGIRANAQAVKDAFAWNPGFREYFAVKATPNPYLLKILKDYDMGCDCSSYTELMLAKSCGFDGEHIMFSSNDTPAEEFAYADKLGAIINLDDFTHIDFLEETIGHIPETISCRYNPGGVFTLSNGIMDNPGDSKYGMTKEQLFEAFKILKSKGAKYFGVHAFLASNTVTNEYYPQLAKELFELVVELKNETGCDIRFVNLSGGVGVAYKPDQTPNDISVIGAGVHKVYDEVLVPAGMGDVAIYTEMGRFMMAPYGCLVTKAIHEKHIYKEYIGVDACAANLMRPAIYGSYHHITVLGKEDAPCDHTYDVVGSLCENCDKFAIDRQLPKIDMGDYLVIHDTGAHGFSMGYNYNGRLRSAEILLESNGEAKLIRRAETPADYFATFDCFDDIKITEMNRLEIANNISTNIERERTKLGMSQAQFAKALDMSLSTYKRIANGESSRIDIYTAYLIYKLTGRFSCELTGFNDDVINLVKRIKKLSKNQRILIDSIIDTELALSAYKDESSHTEDLISVLIPTGNMTDGMILDSYNIEKLDVSNYRKAFGDALHIGIRITSNHLHPVYNKGDILLISRNPIRDGDTGIFINAQNKRAYIRKLHQKNPCELTPINNYGETFYVDSDNVDDMSKWIKFGHVLCKVRMNDIAIDKEHLHYLEQLSEMYPTIGKASSEIINLQAILNLPKGTEHFVSDVHGEYEAFSHVLKNGSGAVRKKIDDVFGLAMNKADKAALATLIYYPREKMELVKQDEPDMDSWYKTTLYKLIEVCKTVSSKYTRSKVRKALPEEYAYVIEELITEKPEVLNKEAYYESIINTTVELGTAEEFIVVLSELIQRLAVDHLHVLGDIYDRGAGPHLIMDRLCRYHSLDIQWGNHDIIWMGAAAGNPACIATVVRNSIRYGNLDVVEEGYGINMLPLATFALKAYKDDPCTRFVFKVAPSGADNMESDLIKKMHKAIAIIRFKLEGQLIKKWPEYGMKERLLLEHIDYEQGTIELEGRTYKLLDTSFPTIDPADPYRLTEGEEEVIQRLRSSFIHCEKLKNHVGLLLKKGSMYKVYNGNLLFHGCIPMEEDGSFAKVNIYGKEYSGKALFDILETYVRKAFFSDDKLERQKGSDIMWYIWTAPYSPLYGRNKMATFERYFIDDDDMKIEKKNFYYDYINKPECAQRILEEFGLHDKRDHIINGHVPVHRLRGESPVKCDGRVIVIDGGFSKAYRRRTGIAGYTLIYNSYGLTLTAHEPFESPETAVRDERDIVSRREAVEVLDKRILVGDTDAGIKMKEKIADLKQLIAAYRSGEIAERDDMDKIKILVVDDESRMRKLVHDFLAREGYEVLEAGDGEEALDIFYQQKDIALLVLDIMMPRINGFEVCREIRQTSKVPIIMLTAKGDERDELNGFDIGADEYISKPFSPKILVARVNALLRRANKLGKEAVISEAGGIVMDKTAHTVAIDGKDIELSVKEFELLDYFMSNQGIALTRERILDSVWSYDYFGDARTIDTHVKKLRSKMGAKGDYIKTVWGVGYKFEIQMKKKKTLSTQLTLVISFIVLLIVGVFWMANNTLLEKYYVFNKEKEMLAVYKMVDLAAKNDKLSDDTFAVAFEKKCVGANIDAVVFNKYGKVIIEGTTDNQEIFQLLLEASMSSYSADYNNLNMTRQKDKRLGTEYIIINNRLIDGNFVYMKTPLESIKESVSISNRFFAIGTVAAIVVGVFMAYIVARNMTRPIRNMTELSTRMAKLDFDAKYIDTENSAKELYVLGEHMNELSQTLEQTITRLKVANNELQRDIKKKEEIDEMRKEFLSNVSHELKTPLALISGYAEGLKEVVNDDDESRNFYCDVIMDETDKMNRMVMKLLSLNHLEDGSDVLEMTRFDLTSLVRGVIDSSKLLAQKNEAVIEFDRTDSVYVSGDIYKIEEVVTNYISNAINHCTRGGTITVSYSMYSDRVRVSVFNTGEPIPDKDIENIWNKFYKVDKARTREYGGSGIGLSIVKAIMELHHRGYGVINHKDGVEFWFELELFIANNQMSIVVDAIALYNIDDRDDYTLALTQKLNELGIKEETKMIAIIDYGAGNLRSVEKALTAIGEESIVTRDRHEILNADKVILPGVGAFGDAMDSLKKYELDKVIHEVCDMDKPFLGICLGLQLLFEGSDESQGVEGLHVLDGQILRIPDKEGLKIPHIGWNSLDLQNNGRLFKGLSEHPYVYFVHSYYLKATDEAIVTATTEYSTHIHASVEKNNVFACQFHPEKSSTVGLSILKNFAGIGEAMFTKRIIPCLDVNNGRVVKGINFVNLRDAGDPVEIAAAYDKAGADEVVFLDITASSDNRNTVVDMVRKVAEKVFIPFTVGGGIRTVDDFKALLREGADKISINSSAINTPRLISDAADKFGSQCVVVAIDARRRADGSGWNVYKNGGRIDTGLDAIEWAVKANELGAGEILLTSMDCDGTKDGYDIELTRLIADNVSVPVIASGGAGTKEHFYEALTEGKADAALAASLFHYKELEIMDLKNYLADKGVSVRRMSMLDGEWAKAVGAEFKKPYYRDLYNFVRDEYATHVVYPPADDIFNAMHFTPLNKVKVLILGQDPYHNVNQAHGLSFSVLPSQKDIPPSLQNIYKELNDDLGCDIPNNGYLKKWADQGVLLLNTVLTVRAHQANSHQGHGWEKFTDAIIEAVNEQDRPIVYMLWGRPAQSKIPMLTNPKHLILTAPHPSPLSAYRGFFGCKHFSKANEFLKEHGVEPVDWQIEDIMTIPAHMLVIPADINSKSLAKVGITVDIIIICFYSCRQDGNSYLTLMNKDKMISANNITLRIGKKALFEDVNIKFTEGNCYGLIGANGAGKSTFLKILSGQLEPTNGDIAITPGQRLSFLQQDHFKYDEFTVLDTVIMGNKRLYDIMKEKEAIYMKEDFSDEDGIRASELEAEFADMDGWNAESDAATLLNGLGVPTEDHYTLMADLPGAIKVKVLLAQALFGNPDILLLDEPTNHLDLDAISWLEEFLINFENTVIVVSHDRYFLNKVCTNIADMDYGKIQLYAGNYDFWYESSQLIVRQMKEANKKKEEKIKELQEFIQRFSANASKSKQATSRKRALEKIQLDEIRPSSRKYPYIDFRPEREIGNDVLFVEGISKTIDGVKVLDNISFTVNHDDKIAFVGGNELAKTTMFKILAGELEPDEGSYKWGVTTSQSYFPKDNTAIFDTDELIVDWLTQYSEIKDATYVRGFLGRMLFAGEDGVKKMRVLSGGEKVRVLLSRMMIMGSNVLMFDEPTDHLDMESITALNNGMIKFPGVILFACRDHQVVQTTANRIIEFLPNGSMIDKITTYDEYLESDEMARKRQVYSMSEDDENDNMSRAKQSMDGNTAAAHVAYAYTEVAGIYPITPSSPMADTVDQWSAAGQKNIFGSTVKVVEMESEAGAAGTVHGSLAAGALTTTFTASQGLLLMIPNMYKIAGENLPCVFDVSARTVSSHALNIFGDHSDVYACRQTGFAMLCETNPQEVMDLSPVAHCAALEGKVPFINFFDGFRTSHEIQKIEKWDYEDLKEMCPMDAVAEFRAHALNPEHPAARGSHENGDIFFQHREACNKFYDELPAVVEKYMDKVNAKLGTDYKLFNYYGAPDADRVIIAMGSINDVAEEVIDYLTAKGEKVGLIKVRLYRPWSSEALLNAIPKTAKKIAVLDRTKEPGSLGEPLYLDVATTLREAGMNDVVLVGGRYGLGSKDTPPSSVFAVYTELEKDAPKHRFTIGIVDDVTNLSLPEVKPAPITSAPGTKECKFWGLGGDGTVGANKNSTKIIGDHTDKYIQAYFQYDSKKTGGVTISHLRFGDNPIRSPYYINQADFVACHNPAYVIQGMKMVQDVKPGGVFMINCQWSDEELAHHLNADAKKYIADNNIQLYTINAIDKAIEIGMGKRTNTILQSAFFKLADVMPIDKAVEYMKAAAKKSYSKKGDAVVEMNYKAIDAGVDAVHKVEVPESWKNPEADAPKAERTGRPEVVKLVNELLDPIAKMDGDSLPVSAFADKADGQYVTGASAYEKRGTAVTVPQWDPEKCIQCNNCAFVCSHATIRPFLLTDDEVKAAPDNMKVADMKPKAGAYKYTMSVSPLDCMGCGECITVCPTAAISMQPQESQAAEQPVFDYLVANVSKKTDAGMVDTTPKGSQFNQPLLEFSGSCAGCAETSYARLITQLFGEQMYISNATGCSSIWGNPAATSPYTVNINSKKGPAWSNSLFEDNAEHGLGMEVGQRYLRDQAIELVKEIAASDKATAEFKAAADKFLETKDDTKANVEPTTALIAELEKAAAAGCEKSKEVLAKKDYLGKKSVWIFGGDGWAYDIGFGGLDHVLASGENVNVMVFDTEMYSNTGGQASKASNIGEVCQFAAAGKETSKKSLSEIAMSYGYVYVAQIALGANPAQAVKAITEAEAYPGPSLIIGYAPCELHGIAKGGMNHCQDEMKKAVKAGYWNLFSFNPALKAEGKNPFTLTSKAGDGSYQEFLNNEARYTRLIKPFPERAEKLFAKSEETAKARYTHLEKLVKLYGEDMSGIFDRRAKRFISTEQAERAVPSRTVMASRVARDDVNRSERVQKKENNIQMDKDDFLLTQIDEFREKAKRLQEMLNTKESKAEELSVIVEEREAKAEELQQILDERQEKADGITAQVAKQIDVLIESVHEKMAEIEQSMNAGMDSLGRQVSSDMDNLGSSVSGQIGNLGQSLGTEISGISQNIGQSLDFGDTLEQTRRITEEGTAAVTSAVNEANAHMLQSLKELNDQLVSIKAELSDKVHTENVKCFRNIQDLFKVMGDKVDTVSELEKQVGTTKTFAVISTVLAIINTFGFVVIALYIFGFFGSIFMAKKIVRVVGHKNPDTDSICAAIAYANLKSHTDDTMEYIPMRAGSISAETAFVLDYFKADTPALLKDVGTQIKDIHIRRTEGVSSNLSMKKAWEMMKILNVVTLPVVNKKDKLEGLIVTGDIAKSYMDVYDNSILAKARTQYRNIVETLDGKIVAGNEHGYFVKGKVIVGAGTPDTIKGNVAEDDLVIISDREESQLICIEANCSCIIVTSGFDISKDVINAANAKDVVVISTPYDTFTTSRLINQSMPIKSFMTRENLIHFDLDDYVDDVRDTVSKIRHRDFPILDENQNYVGMFSRRNLMNARKKQVILVDHNETSQAVANIDEAEILEIIDHHRIGSLETIGPVYFRNQPLGCTGTIIYQMYMEKGVEVTPQMAGLMCAAILSDTLVFRSPTCTQVDKSTALILAEIAQIDVEEFAKKMFEAGSNFANKTEEEILNQDFKIFHSGDYTFGVSQISALSRTELDKVQARVVPLLDKMQVEKQLDMLFVMLTDILNESTYLIYSGAEAASIAASAYNLPQSKDGIMLKGVVSRKKQLIPELINVINERMDSNYTKAGYLTEPFKIFHLRDEHKLNIDFHYHDFHKILIHLHGNVSYCIEGRSYELKEHDIVLVNAGEVHKPILNDDSIYERIIIYVSPQLIDDYVSKGYDLACCFKQAYANQSHVLRLAATKGSRLADTIRGLDSTLRETNEYANELYQKLLFLEFLIQLNRITLHGGIEYINTFSSNKKIVEILDFLNKNLTNRISIDELADKFYMSRYHLMHTFKEETGCTIGSYITTKRLLLARDMIRDGSSVSAACDACGFGSYSSFIRAYRKQFHSTPTNTMKFTKMHGCGNDYVYVNLFEEKLDDPARVSIYVSDRHFGIGSDGLITIGPSDKADFRMRIYNADGSEAEMCGNGIRCVAKYVYDHKLTDKTEISVETGAGIKYLTLYVEENKVSQVRVDMGEPILTPGDIPVVKADGSAYGDDYRVIDEPISAGNREWHMTCVSMGNPHAVVFVDDVAGFELEKYGPLFENHKMFPKRTNTEFVEILSRNEAKMRVWERGSAETWACGTGTCATVMACILNKKTDNKVLVHLRGGDLTIEYIPETNHVFMTGPATEVFSGEIDIIMKLEKLLERMDYKLLAGSTDIEISTLVYDSRKVEKASVFVCISGAVSDAHDFIPDVVKKGAAAVVVEKDVTPIEGVTYIKVDDTRLALACMSAAYFDYPAEKIKTIGITGTKGKTTTTYMVKSILESAGIKTGLIGTIESICGDKRIPSANTTPESYRVQELFKEMVDEGLDAVVMEVSSQALMLHRVSGFTFDIGVFTNLEPDHIGEHEHKDFADYMHCKSLLFRQCRLGIFNGDDEHLEGIMKGHTCQVETYGYKSTNNLVAENVELKKEHGALGIKYHVSGLLDFDVEVNVPGKFSVYNSLTAIAICHHFNVDKKAIGEALHHVSVKGRIEIVPVTKRYTLMIDYAHNAMALESLLTTLKEYEPGRLVCLFGCGGNRAKSRRYEMGEVSSRLADLTVVTSDNPRDEEPMDIINDILQGVHKADGEYVTIPDRKEAIRYCMENAQDGDIIVLAGKGHEDYQEIKGVKHHMDERELIADIIKENPDIRLMSLFKGAGVALITPFNEDNSVNYEMLRTLVRRQIDGGTDAIIVCGTTGEPATMTEEEKLSVIKCVVDETAGQIPVIAGTGANCTQNVIDFSQKVEKLGVDGLLVVTPYYNKATQNGLYAHYAAIAGAVGLPIIMYNVPSRTGCNILPQTAARLGRDFENIVGIKEASGNISQVAKLKKLAGNDLDIYSGNDDQVIPILSLGGIGVISVLSNVRPAAVHDMVMEYLNGNIKSALDIQLKYLDLIEALFCEVNPIPVKAAMKLLGYDVGGLRLPLTELEDANRARLKESMESLKENMGKQNWKPGNMLNPVPAVMVSVTDKAGNNNIITVAWAGTVCTNPPMLSISVRPERFSYNMIKETGEFVVNLTTEELLRACDYCGVKSGRDVDKFKELHLTPLAMQHVSAVGISESPVNIECKVRKSEELGSHTMFIADVVGVTVDDKYMDGTGKFHINDTGLVMYSHGEYFGFGDKLGSFGYSVRKTKKMAEPFTIYKLTILYMLDKAGFPLSNTQISNFFLEKEYTDYFRVQEVIGDLVNADLINFKSTHSNTQYTLTAAGKETLGFFKDKITDGIESDVKSFFTDNKLEFRQENSILADYYRTTDRKYAVRCQVRSESTTIIDLTLSVGTKEQAEAICSNWKNQNEDVYAYLMDMLLRMRYYSLNRYCRDTFGEKLYKLSLDGGMTCPNRDGTLSSLGCLYCSAGGSGDFAADRSLSIKEQLSAAKEKVASKSSCEHFIAYFQAFTNTYAPVDYLRRIFYEAIEDPSVAVLSIGTRTDCFSTEIYDLLSELNKIKPVWVELGLQTIHRSTLDAMNTHTCVEDFIIVTDELRRRGIKVIAHLILGLPHETRGMMLESVNFVAKSGIFGVKLQLLHVLKGTPLADMYIKQPFELFTLDDYCDFVVDCIERLPKDMVIHRMTGDGPRSLLVAPLWSTDKKRVLNTINKKFEVRDTYQGRLNLFMDNKEKALKCHEEWNGKLETIAKSKVNSREDLAIAYTPGVAEPCKIIAEDKEAAYKYTWKANTVAVVSDGSAVLGLGNIGPYAAMPVMEGKCVLFKEFGNVNAVPICLDTQDTEEIIAAVKNIAPGFGGINLEDISAPRCFEIEERLKEMLDIPVFHDDQHGTAIVVLAGIINSLRLTGKKKEDCKVVVNGAGSAGVAITKLLLTYGFTHVTMCDRLGIIGKDYPNLNWMQQKMTEVTNLENAKGTLADALKGADIFVGVSAPNIVTAEMVSSMNKDAILFAMANPVPEIMPDVAKAAGARVVGTGRSDFPNQINNVVAFPGIFNGALEGRATQITEEMKLAAAEALADLVSDEELNDDFIMPEAFDPRVAAVVSEAVKSHIMEQMREKYESLSAFVLKDLAKARGIKGVSSLKKGQIIERMLEEDAKEVEEAEKNGTAEERANSFKEDYAALDSGEEAEGILEVMPEGFGFIRCDNYMPGDHDIYVAPAQIRRFNLKTGDIIKGNMKVKSEREKFQALLYLTTVNGYTPDVALKRTSFEDLVPIFPNERLRLERPGASVAMRVVDLISPIGKGQRGMIVSQPKAGKTTLLKEVAKSVTVNNPEMHLIILLIDERPEEVTDIKEAIEGDNVEVIYSTFDELPEHHKRVSEMVIERAKRLVEHGNDVMILLDSITRLARAYNVTVPPSGRTLSGGLDPVALHMPKRFFGAARNMRNGGSLTILATALVDTGSKMDDVVFEEFKGTGNMELVLDRKLSEKRIFPAIDIVKSGTRREDLLLDEDEQAAVDNMRKAFNGMRSDEAVENVLNMFAHTKSNKEFVNLVKKNRILMREGIHPDYYQATVTCNCGNTFVTGSTKPEIHVEICSKCHPFYTGQQKANQARGRIEQFNKKYGMKMKYSGIGGQAVMEGVMMQNKDTYAVAVRKPDHEIDVKVSKRKNSKTLDVVRKIPILRGVVSFVDSLYLGMSTLMYSASFFEDEDDEGTLASKKKEKEEELTAEEKKKRAAKEKKQENAMLGGTVVLSIVIALALFFALPYFLSGLFKKVISSQMLIAFIEGVIRLAIFLGYIAIISLTPDIKRTFMYHGSEHKCINCIEHGLPLTVENVRKSSKHHKRCGTSFLLIVMLISILFFMFIRVDTKPLQLLLRLVLIPVIAGVSYEFIRLAGRYDNPVVNMLSVPGLLMQRMTTKEPDDEMIEVGIASVEAVFDWKKWQEENNVCAHMTYREAILLGESILQKAKIVDAKNDAWLLLAMACRIDHTYYYVHMDEEMSQEQIREYQALLSKRAERIPLQYIVGEQEFMGLKFRVNSNVLIPRQDTETLVEEALKVIEPGMRVLDMCTGSGCIIISILKNTTNVDGAACDISKQALNVAKENARLNGVFVDFERSDLFEHVDEMYDVIVSNPPYIRSDEIPHLMPEVSVFEPHEALDGSEDGLLFYRRIIKDCRANLKPQGRLLFEIGCDQGRQVSEMMQFAGFSDVHVIKDLAGNDRVVSGVYDSKEEKHVMFDKLEDLIHHYEELMNLLSEPDVANDANRFKKLMKEQSDLAPIVETYKKYKECKQNIEDSLAILDEESDEEMRELAKEELKDSKEQVEELEKKLKILLLPKDPNDDKNVIVEIRAGAGGEEAALFAAEIYRMYVHYAENRGWKVETLDADETGIGGMKSVEFMVKGSGAYSILKYESGVHRVQRVPETESQGRIQTSTCSVAVMPEAEDVDVKIDDKDIRIDVMRASGNGGQCVNTTDSAVRLTHYPTGIVIYSQTEKSQIQNKEKAFALLRTKLYDMELQKKQDAEAEERRSQIGTGDRAEKIRTYNFPQGRVTDHRINLTLYKLDKILNGDIQEIIDACIAADQAKKLSNMEHDAMKSIKKKPIMILLMAALMATFIACLCACGKSDSKKVACVDDLEGAKIGVQLGTTGDIYVSDYENDGSGTKVERYNKGADAVQALKVGKIDCVVIDEQPALAFVKENKGLKILDEEFTNEDYAFCLKKGNTELRDKVNTALEKLQQDGTVQSIIDNYIGSEDQVGKTPYVKKNIDRSNGTLKVGTNAEFPPYEYYEDNKVTGIDMDIMQAIADELGMDMQVEDMQFDAIIAAVSSGKVDVGAAGFTVTEDRQKNVDFTDTYITTKQEIIVKDSQSGSSIGIKEKLYDNFVKDNRYMYIVKGLGNTIVITIFAVMLGIVLGFLIAIVRTSHDRNGGLAILNGICKAYLTIIRGTPVMIQLLIIYYVVLASVTNKILVAVIAFGLNSAAYVAEIVRSGIMSVDIGQFEAGRSLGLNYRQTMKLVIIPQAVKNILPALLNEFISLLKETSISGYIGMMDLTKGGDIIRSNTYEAFIPLIAVALIYLVIVMLLSHGVSKLERRLRSNERMKDNNVILEVKDLHKSFGEQEVLKGISTEVNRGDVIAIIGPSGCGKSTFLRSLNLLETPTSGQILFEGTDLTDKSTDINVTRQKIGMVFQQFNLFANMTIKANIMLAPVKLGVMTKDEASKKADELLTRIGLLDKADAYPAQLSGGQKQRVAIIRSLAMNPDVILFDEPTSALDPEMVGEVLSVMKELAEAGMTMVVVTHEMGFAREVANRVMFINEGTIAEEGTPEEVFGAPKSERLQEFLSRVLMASKYYAVKKGKVPGIYLNWNDCKAMVDGYPGAVYKSFKTIEEAEKFINGEKIIAGEKTITGMKSSGENSTYAFVDGSFNKATHTYGYGGFLVTDHEKYVLQGADNDAEMATMRNVAGEIKGAEAAVKKAIELGINELVIYYDYKGIEMWATGDWKRNKAGTIAYHEYIMSVKDKIKLTFVKVKGHSGVGGNEEADKLAKQAVGILMSIFNVELKKVVDDTYDIEIGYNLSDTLVSDLENGLAGKIKKFAVITDTNVRDPYALPICEKIKHAGYSVDLFVFPAGEKSKSRETKAKIEDAMLKKGYRRDCCIIAVGGGVVTDLSGFIAGTYGRGVPFINYATTLLAAADASVGGKTAIDTPLATNTIGLFNQPQKVYIDIAAWKTLPQRQMASGMAETIKHACLGSEDMFEFIEENLDDIYSFKKFACEYIAENNCRIKYNVVMKDEREAGLRETLNLGHTVGRAIETVSDYKLLHGEALSIGMAAQALMSARLGYMSEEQAERVIKLYERAGLPTRIPDYIDREELVKKLYTDKKVRDGKLRFVLQKGIGATVEFAPGVYAKPIEESLAREIIMELMKVAGVITEYNPFHNGHKYQLEQIKRQTSADYIVVVMSGDFVQRGEPAIIDKYERTRMALLSGADLVLELPSVFATASAEFFAGGGVSVLKNTGVVDMLCYGVESVDHELTKLVAGVLKNPPAKYSASLARLIQSGMSFPAARGRALCEYFQDTYDSSSEKLDSFIASPNNILAIEYEKALMDCDITGFPIQRIGEGYHSTDSTSEFSSATAVRGVISTLIDIDKHNTITNIQLDNSWISTKFSQLMPSDCADILVNCILGGHIVFPDDISEMLYYRLLTWKDKGFAQYSDCTKELSAKIVKNIYKYEGFTQFCNLLKSKNLTYTRISRVLMHILLGIENNDFNICMDNPYLRILGFKKSSGELMHLLKKRASVPIITKVADAPYELISKDIFAADLYGRLCHSQQNEFTHGVVIIMNVLVINCGSSSLKYQLINSDSEEVLAKGLCERIGIDGRLVYQKEGLDKEITEAPMPTHKEAIQMVLDALVNPKTGAVKSLAEIDAVGHRVVHGGEKFSDSVVITEDVIAQVEECNDLAPLHNPANIIGIRACQALMPNVPMVGVFDTAFHQTMPEKAYLYGLPYEYYEKYKVRRYGFHGTSHSFVSKEAASYLGMDLNNSKIIVAHLGNGASVSAVLNGKCVDTSMGLTPLEGLVMGTRSGDIDPSIMEFIAKKENLDIDGVMNVLNKKSGVAGMSGVSSDFRDLEAAYNEGNERAIAAVEVFSYRVAKYIGAYAAAMNGVDAIAFTAGIGENTSFVREKIMAYLGYLGIKIDHVTNDKTRGVEALISTADSSVKVCVIPTNEELAICRETVKLVGMIDISTIVKSINKETTIETELTLTSFESRLGDYPILKKQPISLHISNVENAAVHITGTVDIDIAIPCSRCLEEVPTNMHFDIDKTLKITDGALVDEEMEETDYLIGFELDVDKLVYAEILVNWPMRVLCKDDCKGICKVCGMNLNKGTCSCDSFVPDPRMAAFQDIFNKFKEVMSICPKNKSSKGRRDKRRANWKMSAPTLVKCSKCGELMMPHRVCKNCGSYNKKEIIPQDMNNIDDLVEIYECPLCGGAGILEEDCGSSYYVTCLECGCHSVNIDFKSDEDRLDAAKRTADLWNCGKVISMSPGEMQSTTRVALDAMGGDNAPAEVVKGAVDAVNKRNDIKIFLIGQKVPVERELSLYTYPKEQIEIVDAPEVIEMAEPPVVAIRRKKQSSIVVGMNMVKNKEADAFVSAGSSGAVLVGGQVIVGRIKGIQRPPLAPLIPTERGVSLLIDCGANVDARAEHLVQFAKMGSIYMEHVVGVKNPKVALVNIGAEEEKGNALVKETMPLLRECTDINFVGSIEARDIPKGDADVIVCEAFTGNVILKLYEGLSSTLIGVIKKGLMSTLKSKIGAALALPALKNTLKSFDATEYGGAPLLGLNGLVVKTHGSSKAKEITNSVFQCVTFKEKEINDKIKEYIINKPADMEFEKLRDIIVEVLNVDENEVTMESTFIDDLGADSLDVFQIIMGIEEEFDIEIPNEEAEKIVTVGDAVEQIKKAVSEQMADLNEFQSKIGYTFKNQHLLEQALTHSSYANEKHMKKHSDNERLEFLGDAVLEIVSSEFLFINYPQKPEGELTKLRASIVCEPTLALCTKPLDLGKYLRLGRGEDHTGGRKRKSILSDALEAVIGAIYLDGGFTNAKEFVLRFIMTDIENKQLFYDSKTILQELIQGRHEQLSYELIDESGPDHDKQFTVAVLVDGERVSEGEGHTKKAAEQQAAYQALLLYRNREMYLKSLEVQGFKSFANKIVFEFHNGITGIVGPNGSGKSNVADAVRWVLGEQSAKQLRGASMQDVIFAGTENRKPLGYAYVAITLDNSDHSLAIDFNEVTVARRVYRSGESEYLINGNPCRLKEVSELFYDTGIGKEGYSIIGQGQIDRILSGKPEERRELFDEAAGIVKFKKRKLTAQKKLDNERENLVRVNDILTELERQVGPLQRQSEKAHTYLKKREELKNYDVNMFLLESARIETELKSADEKYAIADDELKETNATYESIKAEYEGLGNDMRQMDERIESLRESITSTSSTRQKLENQIELLKEQIHTAEMTDEHLQLRLLAIEKEKAQRLKSRKEYDDKKAALEAEIEQMRLNELLAVNEHEAVLAEVNRCNDGLEKGKNELIALLQERGSIQSRKQRFATMLEQINIRKAELTKRLLDRKTREAGLDDILDDANKKLNAVNEEIAGLKEKESALLAKAREWRDKSGENARLMEEASTEYHKSVSRLESLKNIAERYDGYGNSIKRVMEQKAKNPGLLGVVSDLIQVDKRYEIAIETALSGNIQNIVTEDEATAKKMIGFLKANHFGRATFLPLTSVRANRNTKNEAALGEKGVLGIANKLVKCDTKFDEVVAYLLGRVIVVDTIDNAITLAKKNHYSLHIVTVEGEYLAPGGSMSGGAFKNSSNLLARNREIEELEKRVDQTKTKLKELRARKDDIATAIALGEEDIAATKTLLQEKYIEQNTAQISVDRADQQKKESANVYEDLRTENAEIEKQLEEINQGKKDIAAQLEASKQREEQLEKENSSYSEILEKQGVLEQEASHKAAAISLELANITKTAEFAIENINRINSEIEKFDEQKKSLVEGAAAAKDDIKKKQADIDAITQTILASKDNNSKLDEELRESLTKKEKMSEDYRGFFAKQEEVSKKQAALDKELFRLNSQREKLKEASETQINYMWDEYELTPHAASELRNDAYDDLPSLKKLIAGIKDEIRRLGDVNVNAIEEYREISTRYEFLKGQHDDLIEAEKTLVGIIDELDSGMRKQFTEKFAEIQREFDKSFKQLFGGGHGSLELVEDEDILECGIRIVAQPPGKKLQNMMQMSGGEKALTAIALLFAIQALKPSPFCLLDEIEAALDDSNVSRYANYLNKLTKNTQFIVITHRRGTMAAADRLYGITMQEKGVSTLVSVNLIENDLTQMEEKEKKPGFFKRLVSGLTKTRDNIVSGIDSLFSGFSHIDDDFYEELEEILIMGDLGVRATESIIEDLQRKVKEQHIKEPAECKELLIESIKEQMKVEETAYRFENEKSVVLVIGVNGVGKTTTVGKLAGKLKEQGKKVVIAGADTFRAAAGDQLKEWANRAGVDMIGGAEGADPGAVVYDAVAASKARNADVLLVDTAGRLHNKKNLMNELGKINKILESEYPDAYRETLVVLDATTGQNALVQAREFSEVAKISGIVLTKMDGTAKGGIAVAIQSELSVPVKYIGVGETIDDLQKFDSDEFVNALFDTKTEMRFCEYVWVVMNSYTEEMKGKTNMLTLDKFEEASEKVKEVTLETKLIYSDFLSDQTGNKVYLKPENMQFTGAYKVRGAYYKISTLTDEERAKGLITASAGNHAQGVAYAAKCYGCKAVIVMPTTTPLIKVNRTKSYGAEVVLYGDVYDEACAKAYELAEKEGYTFIHPFDDLAVATGQGTIAMEIFKELPLVEYILVPIGGGGLATGVSTLAKLLNPKIKVIGVEPAGANCMQESFKNGKVTTLPSVNTIADGTAVKTPGSNIFPYIKKNLDDIITVEDDELIVAFLDMVENHKMIVENSGLLTVAALKHLGVKDKRVVSILSGGNMDVITMSSVVQQGLIFRDRIFTVSVLLPDKPGELAKVSQTLADVQGNVIKLEHNQFVTTNRSAAVELRITLECFGTEHKEQIIAALEKKGYKPRIVRTMIMEEKLEQAYLYDFYGELLNEHQRQVYEDFVFNDLSLGEIASEEGISRQGVADLIKRCNKKLLDYEAKLHLVEKFMSIKSDIRRIHELTNDFKKSHNELLMNEIEAISNQILEELMAFDSLSEKLQNVFKNLRSKGKLTEDDVKAALKEVKMALLEADVNFKVVKQFTKSVQERAIGQDVMNGLNPGQMVIKIVNEEMIKLMGSETTEIAFRPGKELTVIMMVGLQGAGKTTTTAKIAGKLKSKGKKSLLVACDVYRPAAIEQLKINGQKQGVEVFSMGDKNKPADIAKAAVEHAKKNDFNVVIIDTAGRLHIDEDMMAELIEIKEATDVFQTILVVDAMTGQDAVNVAGTFDEKIGIDGVVITKLDGDTRGGAALSIRAVTGKPILYAGMGEKLSDLEQFYPERMASRILGMGDVLSMIEKAQENIDEEQAKKLEQKMRKNEFDFEMYLDSMSQMKKMGGLSSVMGMMPGMGIGGGKMPDIDTDEAEKGMARTEAIIYSMTPEERRNPKLLNPSRKARIARGAGVDVSEVNRLVKQFEQTKKFMKQMPGMMGGKKGRRGGGGLGGLFKGLPFMAVKIRLRRMGQKKAPFYRIVVADSRSPRDGRCIEEIGTYDPTKDPSEYHVNEELAKKWLSNGAQPTETVARIFKSAGIEKMKELVEVIAKSLVDYPDEVNVTETENEKAIVLELRVAQSDMGKVIGKQGRIAKAIRSVVKAAASKEDKKVIVEIVQMEDLLQVGVITSTHGIRGEVKVFPTTDDAARFKKLKNVILDNGKERRDLEITSVKFFKNQVILKFKGIDDINDVEKYKKAPLFVTRENAVPLEENEYFIADLIGLSVTSDEGEELGVVADVLQTGANDVYVVKKAGANDLLIPAIKDCILDVDVENGMMKVHLLAGLRMRFHVLTLFPQMIEQGLSESITGRALKQNIISLNTVNIRDFAHNKHNKVDDYTYGGGAGMLMQAEPVYQAVRSVMSQINKCNQVHSGDNSEKNIADENILYENTSYKNTAEEIKNHNARLIYVTPQGSVFNQQMAAEFAKCDDLIFLCGHYEGIDERVLEETITDYVSIGDYVLTGGELPSMVMIDAISRLVPGVLHNDISAETESFHGNLLEYPQYSRPVEWHDKKVPEVLMSGNQKKIDAWRLEKSIERTKERRPDLYAGFKRLDKCREFLMKNKLLHIDMIELINRGCAEILFEADGEYLLRDMVSKVCFHTRPDEGGSKLIDLAPEDDTKPVDKYSSQHIPKTVTDQITNGIVLHQQRYVELFTANGFNETVECRQAVYTNKEKLSVSGLYRPDGKPMPNGLVIRKLDADDIQEAAPMYPGFDNPDYIIERIEAGAVYGAFFSDNTANDTINTLAGIIGIHEEGSIGMLYVKPEYRHRKLATALETYAFNRALENGWIPYGQIIAGNEASMRLQESMGLHFSKSSVYWMTKNNAMNASEIIKSIENEQLKAEVPEFSVGDTVKVYGKIKEGNRERIQVFEGTVIKKQNGSNRTTFTVRKLSNGVGVEKTWPLHSPNVEKVEIVRKGKVRRAKLYYLRDRIGKAAKVKELVKMSRRRAGLSFRRQRRKFNLPLFKEIVSWVVELIVVIGLAYVLVSFFGIRTNVVGQAMEQTLENDDNILVNRFAYIMSKPKAGDVIVFLPNGNNKSHYYVRRVVAVPGDTVQIKDGALYVNDELYKESTDVASMEDAGLASDPIELEKDEYFVLGDNRNNSEDSRYANIGNVKRDYIIGKAWFRFSGIGSFGTIKMNFQWYPGHMTKAKRQMQEDIKLIDLVIELVDARIPLSSRNPDIDELGKNKYRLILMNKADLADKERTREWSAFFKEKGFFVVSLDARSKSGMKSITDIVMEACKEKIERDRKRGIKNRPVRAMVVGIPNVGKSTFINSYAGKACAKTGNKPGVTKGKQWIRLNKSVELLDTPGILWPKFEDQTVGLRLALIGSIKDEILNVDELAVELVKFLKAEYPGLLAQRYEVSEENDIIELISAVAVNRKCLSKGGEPDYSKAAALIIDDFRSGKLGHITLERPKIMSAEKIGDIKEQLKSITDSQLAQFIETYGSDERGGVIKLVDSAKKRLDKYEKELIRTEVLKKYEREYASYAHICGIDEVGRGPLAGPVVACAVILPKDCDILYINDSKKLTAAKRDELYDVIMEKAVSVGIGMASHERIDEINILQATYEAMRQAIGKLDPAPDLTLNDAVTIPGVDIKQVPIIKGDAKSISIGAASIVAKVTRDRMMVEYDNIYPGYGFASNKGYGSAEHIKALKEIGPSPIHRASFIHNFIMTLQQLRQVLTIAESNSMNEAAKKLFVSQPNLSATVREVEEELGITVFMRNNRGITVTAEGEEFLGYAKQVVEQYHLLENRYLNVESKKKFSVSMQHYSFAVKAFVQLAKEVGMDEYEFAVHETKTKEVIDNVKNLKSELGVLYLSDFNEKVLRKLFKECDIEFKELFTCNTYVYLWKKHPLAGKKVITLDDLQEYPCLTFEQGVNNSFYYAEEMMSTYEYKRVIKADDRATMLNLMVGLNGFTLCSGIISEDLNGNDYAAIPLKESEKMHIGYIKHKGTKLSKLGEIYIDALKNYENKVLMYNKETVIRLNTLDDVQEFVGAASKCDFDIDLKYRQILIDAKSLLGVIGIGTNNDFKVCYMGDDQAFDNVVDKFTVAMTEAGNNYSEKKTQLHISVRNLVEFIFREGDIDNRSSRAMSADAMMEGTRIHRKIQGSMGKEYQAEVPLSLVVEGDLYELTVEGRADGIFTEDGKCFVDEIKGMYRRVELFEKPVFVHRAQAMCYAYIFALQNNMETIGIQMTYCNLETEQTKYFREEFSFEEIKKWFDDLMEEYGKWATFQCEMKNQRQASIKELDFPFEYRPGQKKLVSDVYRTIMRQKLLFMQAPTGVGKTISTIFPAVKAVGEELADRIFYLTAKTITATVAKETFELLEKNGYRAKTIQITAKEKLCPCDEMECNPVTCPYAKGHFDRVNDAVFDLLHRCEMIERDDILSQADRYTVCPFELCLDMASWCDNVICDYNYVFDPNVYLKRFFQEGIKGDYIFLIDEAHNMVERSRQMYSAQIYKEDFLTVKRIMKEHSRSIEKALEKCNKILLGMKRECENYTVYDTFGNMVFSFMRLMTLLDEFLQKANEFPGKKDVMDFYFELRNFLNIYDLVDEHYVMYSELEADGRFMLKLFCVDPSLNIQKRLDKGKSAVFFSATFLPVNYYKSLLSTKKDNYAIYADSTFDSKKRLLAMATDVSTRYTRRSRSEYERIAGYINAVVTQKTGNYMVFFPSYKMMNDVADIYCEKYADETELMLQKNNMSEAEREEFLDRFSEESDRTLVAFGIMGGIFGEGIDLKNDRLIGAIVVGTGLPQISNERTILKDYYDAENGCGFDYAFRYPGINKVLQAAGRVIRTTEDTGVILLLDERFWQREYDLLYPREWSDRKPCNIANVGKLVADFWEQIMDINYELYKVFYYVATSLSFSEASKKLFISQSAVSQSIKTLEKKLGQTLFIRSTKKVQLTAAGALLLKHIEPAMNLIARGESQLLDSGTLGLGQLHIGASDTICRYLLVPYLKQFHQRFPNVPIKVTNATSIQCVELLEQRKVDLIVTNFPNSHLNHSYRQKTICNFSDVFVANPNYFKLRKQEIAFSELNKYPIMMLDRNSTTSEFLHNLFLQHQVDLIPEIELSSNDLLIDLAKIGLGIAFVPDYCINHENKELFVLKTKEKMPSRQIVVSVNTTMPVSASTEEFLNLLPEVGNMSNVRRVYVEKKPDFAVKAKELKHEIKHYLGITTVEAVRVLIRYDVENISEETYKKALYTVFSEPPVDDIFEETFDYGDAKVFTVEFLPGQFDQRADSAEQCVKLLNENEEPIIRSAITYVIEGAITDEQFAAIKKHCINPVDSRAIGMEKPKTLVQEFDDPADVIIFDGFKDMAEDKLKELYSSLNLAMTFKDFLHIQNYFKNEEKRDPSMTEIRVLDTYWSDHCRHTTFSTELKNVKFDDGFYRTPIENTYKDYLNTFSNIYKDRNDKFVCLMDLALLAMKRLKAEGKLDDQEESDEINACSIVVPVEVDGKTEEWLVNFKNETHNHPTEIEPFGGAATCLGGAIRDPLSGRTYVYQAMRVTGAADPTVPVSQTIEGKLPQKKLVREAAHGYSSYGNQIGLATGYVKEVYHPNYVAKRMEIGAVMGAAPRRAVQRLNSDPGDKIILLGGRTGRDGIGGATGSSKAHNTKSTSVCGAEVQKGNAPTERKLQRLFRREEVSHIIKKCNDFGAGGVSVAIGELADGLRIELDKVPKKYAGLDGTEIAISESQERMAVVVAPSDVEQFLAYAKEENLEATEVAVVTEDPRLVLEWRGKEVVNISRAFLDTNGAHQETDVEVEMPCESDNYLDKISTPAVAKMVEAGDMKGAWEAELEDLNVCSQKGLVEMFDGSIGAGSVYMPYGGRYQLTETQSMVAKLPVLKGKCDTVTMMAYGFDPYLSSWSPYHGSIYAVLESISRIVAAGGDYSKIRMTYQEYFRRMNEDPKRWSQPFAALLGAYDAQIGFGLPSIGGKDSMSGTFNDIDVPPTLVSFAVDVAKEKDIITPELKKEGNQLVLFTIDKDEFDLPKYDQVMTLYTAIRNLIQDGAIVSAYALDGKGLAAAVSKMAFGNKLGVTIEDEVTSDTLFAPGFGNIVAEVPVNALSKVREVIDAAGISDAASVVGYVNDKQTIECDDMVLPVDEAVKVWTAKLEGVFHTKATDDTSKVNSGLYDAKNIYVCKNKVAKPTVFIPVFPGTNCEYDSAKAFERAGADTIVKVFKNLTAEDIRDSVDEFVKAIDKSQIIMFPGGFSAGDEPEGSAKFFATAFRNAKMTEAVEKLINERDGLALGICNGFQALIKLGLVPYGEIRQQDAQSPTLTYNTINRHISKMVYTKVVSNKSPWLAQAKLGQTYCNPASHGEGRFVAPKVWLDKLFENGQVATQYVDLDGNVSMDEEWNVNGSYMSIEGITSPDGRILGKMAHSERRGESVAINIYGEQDMKIFESGVKYFKMKLPQIINSLLETDMYKFSMGQTIFHRFTSYKTTWTFKCRNKDVHFTDEMVEEIKEQVQAFCQLRFTEEELEYLDNITWIKGTYVDFLRLWQPRYEEFTITTDAPCGLAIDAAGTWLNTSMYEIPVLAIVNEVYFRMAYDYDVLLKQFKRKLDEKVRLLEEDTYRLSDFSEFGLRRRLSAEAQEMAVKALAEVELPADSHFIGTSNVYLAKKFNLKPVGTMAHEWIMCTGQGNHKHNPAYSNWYALDAWVKEYGILNGIALTDTITTDCFLRDFQLTYATLFSGVRQDSGDPYEWGDKMIAHYNSLGINPRTKTLLFSDSLDFERATALYDYFKDKAKVAFGIGTFISNDTDEEALNIVMKTTKCNGMDVAKISDVAGKGMCKNPDYVDYLNRCIDYRMKNDKMWDQHMHCMFSGDSDADPVLMIKSAINKGLDGICFTDHLDYDYKEEPGLFDLDIAAYEKRIKRLAIVLKEKGCPVNIHWGIEIGLQPHITDKNNGVTKKYPFDLVIGSSHVVNGIDPYYPAFYKGKTEHEAYTEYFESILDNLHSGADFDVYGHIDYVVRYGPDKNKYYSYEKYADIIDAILKEIISQGKGIELNTAGFKYGLGHPNPTEAVLKRYHELGGEIITVGADAHKPEHVAYDFDKVSNILKDAGFMYYTVFENRVPAFIKLMAVRVAINGFGRIGRLAFRQMFGAEGYEVVAINDLTSPKMLAHLLKYDSSQGKYEHADEVSASDDSITVCGKEIKIYAFPDANNCPWGELKVDVVLECSGFYTSKEKAQAHINAGARKVVISAPAGNDLPTIVYNTNHETLKASDTIISAASCTTNCLAPMADALNKYAPIQSGIMVTIHAYTGDQMTLDGPQRKGDLRRSRAAAVNIVPNSTGAAKAIGLVIPELNGKLIGSAQRVPTPTGSTTILTAVVKKAGVTKEDINAAMKAAANESFGYNEDEIVSSDIVGMRFGSLFDATQTMVNQVSDDLYEVQVVSWYDNENSYTSQMVRTIKYFSELAMSLNKKSIDDINVKGKRVLVRCDFNVPLKDGKITDENRINGALPTIQKLIKDGGKVILCSHLGKVKNGPNEGESLAPVAAALEAKLGQKVTFVADYNVTGEAATKAVSEMKEGDVVLLQNTRFRGKEETKPQEAGDAFAKELADLADVYVCDAFGSAHRAHASVAGVTKFITAKGGENVVGYLMQKEIDFLGKAVENPVRPFVAILGGAKVADKLNVIDNLLEKADTLIIGGGMAYTFLKAQGYEIGISMLDETKIDYCKEMLAKAEKLGKKILLPVDAVTIKDFPNPIDAPVETETYDYDKMPADREGCDIGPKTRELFADAVASAKTVVWNGPMGVFENPTLAAGTLAVAEALAKSDAITIIGGGDSAAAVNQMGLGDKMSHISTGGGASLEFLEGKELPGVACADDKMARKKIVAGNWKMNMTPSQAVKLVEELKPLVVSDDVEVVYCVPAIDIVPVVEALKGTNVAVGAENMYFEEKGAYTGEISAEMLLDAGVKYVIIGHSERRDYFKEDDALLNKKVKKAIEAGLTPILCCGETLEQRESGVTLDWIRLQIKSDLAGVAASDVANMVIAYEPIWAIGTGKTATSDQAQEVCGAIRECVAEIYDQATADSVRIQYGGSVNAGNAAELFAKPDIDGGLVGGASLKADFGKIVNYKMSKKPVVLMVLDGYGLSDHKEGNAIAMANTPVMDKLMAECPFVKGAASGLAVGLPDGQMGNSEVGHMNIGAGRIIYQDLTRITKAIADGDFFKNKVLLSAIENCKKNDSDLHLWGLLSDGGVHSHIEHLYGLLELCKKENFDRVYVHAFLDGRDTPPASGKDYIEQLLAKMKEIGVGKIASLSGRYYAMDRDNNWDRVQKAYDSLTKGEGVKATCPVKAMEESYANDVTDEFVLPTVITNEDGTPVSVVKDNDSVIFFNFRPDRAREMTRAFCDDKFTGFERPFLKTTFVCFKDYDESIPNKLIAFEKEEIQNTFGEYLAANGKKQLRLAETEKYAHVTFFFNGGVEEPNIDEARLLVNSPKDVATYDLKPEMSAPEVGMDLVEAIKSDKYDVIIINFANPDMVGHTGVIPAAVKAVERVDSLVGDAVQAIKDVDGVLFICADHGNAEKMIDYETGKPHTAHTTNPVPFILVNADPSYKLREGGCLADIAPTLLEIMGLPQPKEMTGKSLIVKMQEFKPFKEGKVREVYDNGDSLIMVATDRISAFDHILKNKITDKGAILTQMSKFWFEFTKDVVPNHMISVDAKDMPEFFSQDRFNGNSMLCKKLEMLPIECIVRGYITGSGWVSYQENGTVCGIRLPEGLVESDKLPEPIYTPSTKADLGDHDENISFEKSVEVLEKIYPEKGREYAEKIRDYTIALYKKCAEYALTKGIIIADTKFEFGLNEQGEVVLADEMLTPDSSRFWPLDGYKPGQGQPSFDKQYVRDWLKANPDNDLLLPDEVVVKTVEKYKEAFELLTGSKFSRMNQDNNINQYINTCIDTKSHTGTKLKRCSDIDEHNHVFDELHEECGVFGMYDFDGGDVSSTIYYGLFALQHRGQESCGIAVSDTHGPKGKVTTHKGMGLVNEVFTPDILEPMKGDIGVGHVRYSTAGSSTRENAQPLVLNYVKGTLAMAHNGNLINAKELRKELEYTGAIFQTTIDSEVIAYHIARERLNSKTAEEAVRRACQKLKGAYALVVESPRKLIAARDPFGFKPLCIGKRDNAYIVTSETCALDTIGAEFVRDVEPGEVITITPEKGIESDMTMALAPEKQARCVFEYIYFARPDSHIDGVSVYGSRIKAGRFLAMDSPVEADIVTGVPESGNAAALGYSLESGIPYGTAFVKNGYVGRTFIKPKQSSRESSVQIKLNVLKEAVKGKRVVMIDDSIVRGTTSDRIVRMLREAGATEVHVRISSPPFLWPCYFGTDIPAREQLIAYNRTIEDIRQIIGADSLGYLGIDRLHEMVEGLPICMGCFTGKYPMEPPKDDIRGEYFDKEIDLERKMLNRMSTDRYTSPLSERYASKEMQYIFSQDMKFTTWRKLWIALAETEMELGLSQDGKPVITQEQIDELKAHVDDINYDVAKEREKLVRHDVMSHVYAYGQQCPKAAGIIHLGATSCYVGDNTDIIIMNEALKLVHKKLISVIAELANFADKYKNQPTLAFTHFQPAQPTTVGKRATLWLNEFMLDLEDLEYVQGTLKLLGSKGTTGTQASFLELFNGDNETIDKIDPMIAKKMGFKDCYPVSGQTYSRKVDTRVVNVLAGIAASATKMSNDIRLLQHLKEVEEPFEKNQIGSSAMAYKRNPMRSERIASLSRYVLADVMNPAITSATQWFERTLDDSANKRLSIPEGFLAIDGILDLCLNVVDGLVVYPKVIEKHFMAEIPFMATENIMMDAVKNGGNRQELHEKIRQLSMQAGKTVKEEGKENNLVDLIAADPAFGLTKADIEKNLKPELYVGRAPRQVDVYLRDVVNPVLEAHKDESGVKAEINVMDMAVGIIIGGAFTSIVTSLVNDIINPILGVFGGMNFDQLSVKLFGEATLYYGKFLTAVVNFLIMALIVFCIVKAMNAAGERFGHKEEKEPDTKECPYCKSKIAIAATRCPNCTSMIGTADESEKMATLKIVLSVLFIIVSLVITIVILFQEGKSAGLGTIAGVADTYWGKNKGRSKEGRLVKATIVCVVLFFIISIALNMGIWMSNIDKYETRKKMVYDFMCDDMYVPMKIKELCIVLGVKKEDRPQLEQILLDLQAEGRITLSKRGKYSKSEIKKTVGVFTAHQRGFGFVTVEGEPDDIFIPAEYVNGAMHMDTVEITISPVTTGRRKEGKVVSVIERGMKQVVCTYEASDNFGFAVPDNTRFGTDIFIPKERSKGAMSGHKVVVEITSYGKKGKKPEGKVVEIIGHIDDPGTDILSIVKAYDLPVDFSEKIMHQVQNVAKDVTPADMAGRMDLRDWMMVTIDGEDAKDLDDAVSLYMDGNNYVLGVHIADVSNYVQEHSALDVEALKRGTSVYLVDRVIPMLPRELSNGICSLNEGCDRLALSCIMTINKKGEVIDHKIAETVIKTNRRMTYTNVKKILADKDAAVIEEYKELVPMFEKMAELAAILRKKRMKRGSIDFDFPETKVVLDEDGHPIDIKPYDRNVATKLIEDFMLIANETVAEDYFWQEIPFVYRTHDKPDSEKIAKLSTFINNFGYTLHIGADEVHPKELQKLLMKVDGTDEESLISRLTLRSMKQARYTTACTGHFGLAANYYCHFTSPIRRYPDLQIHRIIKENIRGRMNDNRREHYESILDAVAKQASETERRAEEAERETVKLKKCEYMSNHIGECFEGVISGVTEWGFFVELPNTVEGLVRVTDLTDDFYEFYEDTYELAGSATNKRYKLGQKIKVVVDSTDKIMRTIDFKPAEMAKEPKKLIANNKKVYHDYFLLEKYEAGISLAGTEVKSLRMGKGSIKESFIRIENGEIILYGMHITPYEKGNIFNKDPLRPKKLLLHKKEIEKLSSKMKEKGFTIVPVEVYFKGSLVKVEIALVKGKKLYDKRADIAKKDQKREAQRDFKIRNLGPTDEPNLELKCKVYNINDGKNKAIMESCGWLNDYMTFVNKVREYHADGAFDDLAIDIEKAIDYCIDNDILKEFLKTYRSEVTKSMQLNYEFDRQLELERADAIEEGMEIGENKMLFTLVTKGKLDIDTAAEEAGVSVSEFEKLMSEAGYKVPETVMLSLIPLYIIDFKFFDKLNIGLQRKIALAKERGHVARGMIVKEDAKRLVVNNSQSAYSYWAARYTYTVDGKEYRKRFSCDKRHSTRSELRTIINVYWLDDPNKPFWDYSSDSLGAWFGIFTILFPWIGAILIIQLLGGADAIAQYNNSRMMRKNKNILKKGMILAAVSTMVVTMAPAIPAYAYGEADSKTGQAAFNAATTGSADYQSWLTGTWQGGTQDFANTNKIALTPGSTAKDLGFAWYSKTKGTPAVMVWKDGSKAGAQIVKGTATDISAENWQGEVYAASNKVSINGFFEPDTKYVYQYTDNYSDNGDTIWSDEYTYTTHTTDTFSVILTGDPQIGASGSKSDKEANDMSVAQDAYNWNKTMQKAMEIDPDASFLLSAGDQINESNAGSEETKKTRESEYAGYLYPSVFRSLPIAATIGNHDKDGSDYTAHFNNPNSDDNLGSTDAGCDFYFNNGNVLFISLNSNNRNQAEHREFMKKAVASNPDAAWKVVVFHSDIYGSGQPHADTDATTNRIIFAPLMDEFDIDVCLTGHDHTYSRSYQVQDGNVIDYDLSKGSVNNPEGTLYITTGSGSGSKYYNLLNYTPYYIAERTNACLPSFSTIDFSSGTMTIKTYDYNGNKYADDFTITKTTDAQSADEVIAAADALVNSTDVAYTDESMEALKSALASLKELKASGTTADDPMVSDITTNYGTANDRVKGYGSIANDDDKDGAKNRFKKGISTLLDKTIYTQVAEGKEENLSDYSADKAPVVKGIDEAKKAVVSAINALQVKQTAPNGNQNGNADQSGNGAQDSTNQNGNGAQGGAGQQIAGNNAGGSGSQNVSTANTGASKSDSDGVKTSKSAKVKTGDVNHGGMYAALGVLGAAILVAVLGMRKKGKFWQKMAKIIDTLGKYLIVALITLAMFICFRSVERKPLLADDNTSFVRAVVTQNDNEDLQAEASLDSGDSQKVVLLIKSGSHKGETVDAYSLNGYLYGANCKVGTRVIASLSEYDGSLSANVYNYDRENEIWVLLAAFFGLMWLVGGKKGFNSILALIFTFATVIFLYIPLMYIGVSPFIAATASVVIITVVTFTLIADWQMKSIGAMLGTVFGVVVSGIIALLFGHFGHVTGYNVDDIENLIYVGQNSKLDIGGMLFSGILIASLGAVMDVAMSVATSLHEIKEKSPDISAKEIFKSGINIGRDMIGTMSNTLILAYVGGSLGLVMVIYAYSYQMHQILNMYSMAIEIMRGISGTMGIILTVPITSLIMSFLLTRKNKEMTTDQKEKRNDEYNKYVKRVTPTHCLSANMLKAFILGGIICTIGQLIVNTCTQYFGFSSDEASAWCSMILILISCILTALNLYAPLANWGGAGALVPITGFANGVCSSACEFQVEGQVFGIGCQIFRIAGPVILYGIFSSWVLGVIYLVVTGLMYTLDDIKKEDQEIASAITDEFERQNSHIELIASENWVSPAVMSAMGSILTNKYAEGYPGRRYYGGCECVDEVEELARERAKKLFGAEYVNVQPHSGAQANMAVQFAILKPGDTIMGMNLDHGGHLTHGSPVNFSGSYFHVVPYGVNDEGFIDYDKVEEIALECKPKMIIAGASAYARTIDFKRFREIADKVDAVLMVDMAHIAGLVAAGLHPSPIPYAHVTTTTTHKTLRGPRGGMILCSQEMQDKYNFNKAIFPGIQGGPLMHVIAAKAVCFKEALQPEFKEYQKQIVKNAQALCKGLQSRGIKIVSDGTDNHLMLVDLTPFGLTGKSIEKLLDAAHITANKNTIPNDPQKPFVTSGIRLGTPAATSRGLKEDDFDKVAEAIAMIIKEGESAVEPAKAIIKTLTDKYPLAFMIDLKFLRENPDLVKENIKKKFQDHKLPLVDEVIEYDKKAREAQQEADDLRAKKNQVSKQIGALMAQGKKEEAEAVKAEVAQISKRLTELEPLEKEYQDKVLEDMMKIPNIIDPSVPIGKDDTFNVENEKFGEPVVPDFEIPYHTDIMERFDGIDLDAAGKVAGNGFYYLMGDIARLHSAMTAYARDFMIGKGFTYCIPPFMIRSNVVTGVMSFEEMDAMMYKIEGEDLYLIGTSEHSMIGKFIDTINDESKLPYTLTSYSPCFRKEKGAHGIEERGVYRIHQFEKQEMIVVCKPQDSKEWYEKMWKYTVELFRSLDVPVRTLECCSGDLADLKVKSCDVEAWSPRQKKYFEVGSCSNLGDAQARRLKIRVKGEDGKKYFAHTLNNTVVAPPRMLIAFLENNLNADGSVNIPKALQPYMGGTEKLIPKHMLKQIKNFLIMTLSITIMAIGVYYFKFPNNFTFGGVTGAAVVFAKITPLSASMFSTIVNMLLLVVGFFFLGKGFAIKTTYATILLSVELLVLEKLDPLTHPLSNEPMLELIFAIALPAIASALLFYVGASSGGTDVIAMIVKKYAHVENIGMALFLTDLVMIIIACFVFDIKTALYSFVGLVVKSFMIDAIIENIMLRKSIMLICDDKDVICDYITNTLEKSATYVEARGAYTGERNYIVFSTLTKKQAIELRSFIHQNKLHAFMSVMSTSEVFGKGFSSLMSDVNIIREINYKYYFYKRYIILVKLIRIITIYNWKIMDYKNSGVDIEAGYKSVELMKKHVKETMRPEVLGGLGGFSGAFSLASIKDMEDPVLLSGTDGCGTKVKLAFIMDKHDTIGIDAVAMCVNDVACAGGEPLFFLDYIACGKNYPEKIATIVSGVAEGCKQSGCALVGGETAEHPGLMPEDEYDLAGFAVGVVDRKDIITGEGLKDGDVLIGMASTGVHSNGFSLVRKIFKMDKETLNTYHEELGTTLGEALLAPTRIYVKALKAVKDAGVTVKACSHITGGGFYENIPRMLIDGKRAVVEKNSYPVPPIFKMMAREGNVEEQMMYNTYNMGLGMIVAVDPADVDKTMEAMKSAGDTPYVVGKIIDGEKGVDLVMKIAVCVSGGGTNLQAIIDAIDNGTITNTQIEVVISNNADAYALERAKKAGIKAVCISPKNYESRAAFNEDFLKQLNSYHVDLVVLAGFLVVIPPEMIKQYRNRIINIHPSLIPSFCGTGYYGLKVHEGVLARGVKVTGATCHFVDEGTDTGPIILQKAVEVKQGDTPEVLQRRVMEQAEWKIMPHAIDLIANGRVSVEDGHVIIDEKMKVLVVGSGGREHAICRAVAKSSRVDKIYCAPGNAGIAALAECVPIGAMEFDKLVSFAKDNAIDFTIIGMDDPLVGGIVDEFEKAGLKCFGPKKNAAILEGSKAFSKDLMKKYNIPTAAYENFTDAKEALKYLETAKFPIVLKADGLALGKGVLICNTLEEAKDGVRTIMEDKKFGTAGNTMVVEEFMTGREVSVLSFVDGKTIKIMSSAQDHKRAGDGDTGLNTGGMGNFSPSPFYTKEVDDFCKKYIYQATVDAMAKEGRPFTGVIFFGLMLTEDGPKVLEYNARFGDPEAQVVLPRMKNDIIDVMEACVDGTLDTIDLQFEDNACVCVVLASDGYPVKYEKGFKITGFEKFDGKDDYYCYHAGTKFDDDGNIVTNGGRVLGITATGATLKEARAKAYEATEWVQFDNKYMRHDIGKAIDEAMKHKGIIFDMDGTLWDSAENVAKSWNKAIADYGYERAPITKEDMYSVMGKTMDVLASIIFPNCTCRDELINVCYREENDYLTAHGGELYPDVENTLDELSERYDLYIVSNCQRGYIESFFSYHGLGRYFKDTECYGNNELEKSENIKLIVERNNIDEAVYVGDIQGDYDSSKKAGVKFIHAAYGFGTIDDDVPAIRKFSELPQVADRVFDEIEKHMLEKIFKLKQNNTTVKTEILAGLTTFMTMAYIIALNPNLLTGFGAEGTKALWNGVFLATCIASAVGMFVMAFLANKPFALAPGMGLNSFFAVVVANIVSITGLSYVDSFQAALCIILIEGILFFILSIFNIRDKIVDAIPYGVRMGISPAIGLMLLNIGFGSNAGVYSKDGGPFYVMKDFFGALTPGLAKTNMTDGYSSMVLTVVTMFIGLFVIIILAHKGVNGAVLFGMLAACVVYWAGEAIFFGTNPFASLATASFVPQFKDMADTTLFKFDFKDFISIGWFTAISLIITFCIIDMFDTIGTLVGTASRAGMVDKEGNMPNMKEALVSDSVATVVGAVTGTSTVTTFVESASGVEAGGRTGLTAFTTGILFLACVFIAPLAAIIPAAATSSALIYVGILMLGGLKKVDFEDLSQVAPVALMLIAMPISGSIGHGIGLGLITYTVLKVFTGKAKEVSILTYAISLLFLVKFFLVVMDKHNEEHIYVAIDLKSFYASVECRERGKDALTTNLVVADPTRTEKTICLAVSPALKAYGIPGRARLFEVVQRVKEVNKLRLSKLMASGHAAGTVERSRQIEGEQSDRKQSAGEQQKRLQTEGNPDERKKYVTEIDIAENDITESTMAGFDYASYNAKLLDAHPEYELTYIVAPPRMALYMDYSTRIYNIYLKYIAPEDISVYSIDEVFMDVTHYLRTYHMTARELASKMIDDVLKDTGITATCGIGTNLYLCKIAMDIMAKHAKPDERGVRIAELNENSYRRKLWDHRPITDFWRVGAGYAKKLEAAGMYTMGDVARCSTGGSNEFYNEEKLYKMFGINAELLIDHAWGYEPVTIADIKAYRPQTNSISSGQVLQEPYDYEKTKLIVREMTDLLVLDLVDKRLVTDQIVLTIGYDIANLSNKADRCFGNNYDHAVNKKGRDSIGGKKGTHRDYTGEITIDRYGRKVPKHAHGTANLGRYTSSTRIIMDAVMELYDRIIDPSLLTRRITVVANRVCDESKVQESEQFEQLDLFTDYQERDKEKQKEDEALSKERKLQEAMISVKKKYGKNAMLKGMNLEEGATTISRNNQIGGHKAMGKYDDIIDLPHHVSKVHPQMSIWDRSAQFAPFAALTGHEEAIAETARLTNEWHEPDEDKKRELDEKMNELMMLYRKRNFNSDGLYDENVINTMAENYFEVTYFVPDEHKEGGSYEHVTGYLKKLDSIGHLMIVVDDNGAETVIDTRRIYDIDLMDKQMERAGDDNKNNIGVLYGIGVGPGDPELMTLKAINTIKACDIIAIPAVSKEECYAYSIVQAVLPEIEKKHIMCTPFPMIKDKEKLTISHNKIYSDIVSELEDGKSVAMLTIGDPSVYSTYMYIHKRVMQAGFTAVMISGVPSFCAAAARLGISLGEMMDEIHIIPASYDVRDTVGYGGTCVYMKSGKKLAELIEVLRTGEAIRKKKMTVYGVTNCGMESERVYRGLDELTEAKGYLTIVIVKYSMSIVDKFGEKVGEIAENDPVKARKLLLAGYRLQEKRLALFPDRKLPMSGQYVAKIVMNNIIQALAKPENAAMVSIFVPGELLTAAGLTPYSVEALSCFIAGTKCEQAFLRQTEKEGFPETMCSYHRVFLGAALNGIVPKPKCMVYTNLACDGNMMTFPYLKERYEIPSFYIDVPYEKNYDSVMYVAKQLRELKNFLQDVTGREITEESVKKAVDKSKIASNNYYRQLHLRKGHDIASTLTNELYALFMCHLLAGTDESVRYTQLLRDDVRRAPAGDGFHVLWMHTMPFLQDAVKDVFNYSDTIHISASDFIADGFRSMESDDPYEALAEKMVYCIYNGSVNQRIEEAKELADTVGADGAVLFAHWGCKNTIGASSLIKRSLEREGLPTMVLDGDGCNPANASDGQISTRLQAFVEMLTEQERNMINYVCKYAPVELFKGFGQECAVLEEMPENFDKSDKIAHANLCGFGKSVIQAVLEGKVEELVLVNCCDSMRRVYDIIENTKKCKFLYMLDLPHEDNECENIKFAQSILRLKNAYERYSHRTFDRELFIKSFAKPESERKPYIGLMGVHVSSILEKTIRENMQMDVENMTCTSGRNLIILQKDLRNMDDETLFVAYAESLLGQMPCARMNNNTRRNQLFLDPSLKGIIYHTIKFCDYYGFEYASIKNNIKVPLLKLETDFTSQSAGQLLTRIQAFAETIEGSDDMDPTKGISEEARKRMESGVYYVAGIDSGSTSTDVVILDQDGKIKSTMIIPTGGGAMMSAEKSLEKAVEKAGISKDDIVRIVTTGYGRAYINSGDDSITEITCHAKGAHYLNPNVRTVIDIGGQDIKAISIDENGAVKNFLMNDKCAAGTGRFLEMMARTLGLSLEEMSTMGLDWKENIVISSMCTVFAESEVVSLVAQNKAVSDIIHGLNMSVASKVGALAARLGQDNPGEYMMTGGVAKNKGITNALEEKLSAKLYICDEAQLCGALGAALFAYEKCREAMIRKIIKIDKEKCNGCGACASACHEGAIDIIDGKAELVREHFCDGLGDCLPECPTGAISFEEREAPAYDEEAVKEAQKKIAAKNRAISSHSGCPGSKIMQIRRTETSEPVKATSAADSGSKLQNWPVQIKLAPVNAPYFNGSKLLIAADCTAYAYAAFHQDFIRNKVTLIGCPKLDQVDYSEKLTAIIQNNNIQSVTIVRMEVPCCGGLEIAAKKALQASGKFIPWQVVTISIDGKIMEMQKYLSILRNSPFFKGLTDNEILSILHCVNATTISKKRDSYIFRAGDITEVMGIVVSGCVLIIQEDIWGHRNILSKCHAGDFFGEPYAASQRAVLNISVVADEDCEIILLNVKRLLITCPTACEHHQKLIRNLVSVLANKILILNDKITHVGKRTTRDKLLSYLSAESIRHSSLSFDIPFDRQQLADYLCIDRAAMSTEISKLQKEGFIKTNRNHFELQLSIIKKKNYTIMNNYCMIQNSKTFAFSAENPTGVRAGGSQGGDCTKLRPTVTIHAGETVTLVDAAGPGVIQHMWFTGYVGHHFIIRMYWDDQEYPSVEAPLSAFFGCAYDENFVDRDGKYPVLNSAMMLVAPGRGYNSYFEMPFHKRARITMENRGDKDEELFYIITGAYQEIPAEAGYFHATYRQEHPVQKGRTYTIVDGIEGRGQFVGVTLATGMNGNNTCWVEGEARMYLDDDPYPSIHYTGTEDYFGGSYGFGNDIIIKSYQTFSGLYTGMYAIYGDNREFYNGQQRFLLYHFHIADPIRFENKFRMTLDNMGWTGPRYDDYTSVAYWYQTLPSAPLMPLPTDAEMCMRMLLEEKFLEFHRYVSSHNLPLEAISVGDENKVLCEMHYAANAPRNIYSHTKSFTVTAVGLAIEEGKLSLEDHVAEVFKDKLPSNPDPNLEKIQLKHLLCMSSGFGKALLMNADRRPGVGAPDYEKYMMAQPVPVEPGSAFCYSSADSILAAHMVERAVGKRMGEYLYEKVFQPLDMGWPLWEHDPQGHPNGGGGMYLTCTEMMKLGQLYLAEGNWKGEQIISRDWVQEVSTPKFTFEPSADPWHVGYGYQFWISPYPGSYRADGAFGQITTILPEKGLVVSIQCPERGNFDQVKRALHEHFLMELMKTCKEKALEWNVSPRSVNDMCKKGRIQGAIKEKGSWLIPDDSPKPMDGRVSNGKYIKKNMVAKAEVKSLPIGISDYVRAQEEYYYVDKTLLIKEFLDQKPLVSLFTRPRRFGKTLNMDMLRVFFEISDKNTSKYFADKNIWQCGEEYRSHQGKYPVIFLTFKDVKFDTWDATIDKIRGLLQEEYGRHQELLNSDKLSQYEKEYFTKIISATANEVELTSSLERLSKMLASHYDKAPVIIIDEYDTPIQEGYSKDFYDEIIGFMRNFFSGAFKDNKNLSYGFLTGILRIAQESIFSGLNNLTVNSVMDEEYDSFFGFTESEVKAMLSYYGVSDKEEELKDWYDGYLFGSEEIYNPWSVINYISKGCLPQAYWVNTGKNEILDDVLSVATDDITERLYDLLQGERVVARIDQNVVYRSLAEDPANIYSLLLVAGYLKTPKKELQADGSYLCEVSIPNREIAAVYKSEILSHFLQTGAITRTTANKIAESLYANDYKKLQSAIGEYMDKSISFFDGGAEGFYHGLMLGLIALMDNQYKIKSNRESGDGRFDVSLIPREKRYPGIILELKWKEKLSDVELEKWSNEALKQIGELRYDSEMKEDGITEILKFGIAFSGKKVCVRTEMFPTINKKETGVNLRRIMDMRGVKPKDIQEYLGFGCVQSVYRWLDGAIHFVRMEEIRRVMLHIKINDMEDLAGMGLRIDKVKLSDAKAWLIKLQADGRGYSTIHSVRGVVRPAFQMAVDDDLIRKNPFEFQLCTVVVNDSVTREAITRKQEKKFLEFIKNDEHYKRYYDGMFILFKTGLRISEFCGLTLSDIDFEEKLISVDHQLQRTRDMQYIIEDTKTTSGTRTIPMTEEVYECFKRIIENRKKPKKEPAIDGYKGFLFLDKKDMPEVALHWEKHFEWALAKHNRIYKEQLPKITPHVCRHTYCSNMAKSGMNPKTLQYLMGHADIGVTLNTYTHLGAEDAREELGKFAKMAMIKVLFICHGNICRSTMAQSIFTHLVHRQHLDAVFEIDSAATSREEIGNPPHYGTKNKLYEEHIPLIPHRARQMTRDDYLYYDLLIGMDTANIRNMTRIAGGSDSQQKIFKMLSFADYGTNHKLTAARDVADPWYTGDFDATFDDVISGCRGLLEYIKEVYNLMQLQNGRPTDTTGRLDKEIRTYDFLDKLGIEYQRIDHEAAFTMEVCEEIDKTLGATICKNLFLCNRQKTDFYLLMIPGDKTFKTKELSHQIGSARLSFASPQDMEKYLDITPGSVSVMGLMNDHDNAVRLLVDEDVLKGEWVGCHPCINTSSLRIKTKDMFGPVIKAMHHDMTVVKLTGEAMVKAVLFDMDGTLIDTEKYYRIFWPMALKQFGYDMTDEQALSMRSLGQPYAPQHLKDMFHDPDMDYNKIRAYRRKIMEEHLEKVGIELKPGAIEILTYLKEKGIHRAISTANDIERAEKYLKKIGLYGYFDKIICAPMVEHGKPAPDVYEFACSELKLAPEECMAVEDSPNGVKSAYSAGCKVVMVPDLTQPDEELKKMLFACVDRIDEIKTIVMGTENDLPGISLKDEQRQLQNIIGIAQDNLDRAKESVKKLTDDLEDLRDVYEAQDKEGLALWNNATAQLHENERNIVRCEKARKKPYFGRIDFKVPRQKSQESYYIGRVGIAKKASEPVVIDWRAPIASVYYESSLGPCKYTVSSEGTFEIDLNRKRTYEIADDKLIDFFDSDVVANDELLTKYLAKNKKAVLGEIIATIQKEQNLIIRRSPKTNIIVQGVAGSGKTTVAMHRISYILYNYADDFRPEDFYIIGSNHILLNYITSVLPELDVYGIKQMTMEQLFTRLLYEDWDDKKYSIHEVSKNDSRNSIKGSKEWFEALEKFCLDYEEKCIPRDEVYMEKTGNLLVGKVLIDTYLHDNPLLSMQSKILMLNEIIYSKYENEVLGKEVKFPAKERSKLDKKYKTYFGKDDWKGSVYDFYRDFLLSQKEYDIDIPKDSFDVYDLAALAYIYKRIKETDPVREASHVVIDEAQDFGMMAYCCLHYCLRNCTYTIMGDTSQNIHFEYGLNDWEDLKKLILTGTYDAFGLLRKSYRNTVEISEFATEILRHGDFAIYPVEPIIRHGNAVRIEEYANVRSLISASVDTIKGWQSEGYETIAVVCRDEAEALKVSAELKKHIEIADDDIETAQFGAGVMVLPVAYTKGLEFDAVLLFDPSERKYPADDSHVKLLYVAATRALHELAVFHRGRLTPLIADPAPSNRHQKEFSAEPLTKAKEYEKQQLTEKEIEEQKRVDGRRDMDEREYFGPSRIALKPEQLTNKAENEKLDLSAFVKKDRENQTQCTATDMANKIKIKEVSKAAKKSCLPLNPSPYAYGSIPDNDILHVKGHSKGKFAVKWLKKGKSHVEIATADGTLYVIPITPEIVRVIFVKGIGVKPHKTYWKQKADTAFKWVAKESKSLIEIQTEKLILRIEKKNGAIQYFDADRNLLVSENATEPRLLNNGECYTFFDWDKSEKLKSKGILATDLTDLTNKARYISFGGRQQRLPLVVSNKGYGIATASSRTALFCNIKMYGQYIFVDGDTQSDYYFIGAGSVGHTLELYGTLMKFRTENEFTHFKFSDVHVSDIMMSFGTFKICLDNVIIKADNSKNRDIRDMRTNGLILKLSDANIISFIREGFKTYDADGNLKSTTADEEIEETDYLDTFNNFLDGYAYLIEKENENYTFVFDGTDERSYTLIVSASKDECEWDRFMNIEAMKKLLFFDIDGTLVDFGKSTMSPSTADALINAKQNGHMIFLCTGRSYNQIYPSLKAFDFDGVVAAAGGYVTVGDKVIAHHVYGQNLLQKVLDTVGDNDTGLIFQTKDKSITNHKWADKFISAFSKQFDMHVIQDNPTFKDIVIDDELSSFSNRYADVESTIYCNCNYHIDDLRKLLSDEFVVTLSSFKEPEPYSGEITLRGVNKATGIRDVVEFLHMSQADTIGFGDGQNDFDMLRYCDVGVAMGNSSDEVKAVADIVTDDIKEDGLKNAMVHLGLVMEFLTGAVQKEDLGIAEILAGDYEGKNIKVKGAIHTIRDMGEVAFIVLRRRDGLVQCVYEPGKSQFSVDDLKEADTVEVCGTYKSDDRSPNGFELRLDTITILSEPAEPMPLQINKWKLNTSLEAKLNNRAVALRNPRERATFRIQEGITRGFRDFLYNNGFTEIHTPKLGAKSAEGGANLFKLEYFHRPAILQQSPQFYKQMMVGVFDRVFETAPVFRAEKHNTKRHLNEYTSLDFEMGYIDGFEDIMEMETGFLQYTMELLKTSYAKELELLKIKLPDVASIPRVRFDEAKQRVAEKYNRQFRNPFDLEPEEEVLIGQYFKEEYGSDFVFVTHYPSKKRPFYAMDDPADETYTLSFDLLFRGLEITTGGQRIHDYNKLMEKIAKRGMETEGMESYLLAFKHGMPPHGGLGIGLERLTMQLIGEDNVREATLFPRDLSRLEPMNHIGTREIATERLTLRRFEIEDAENMFYNWANDPEVTKYLTWPAHESVDTTETILKEWISKYDEKDFYQWAIELNDLEQPIGTISAIKTDERVESVEIGYCIGKRFWNNGYMTEALTAIIRFFINEVGAGRVWARHDTENPNSGKVMAAAGMDYEGTLRHAGFNNQGICDEAVYAKVRSAALDEEPEDETPEQQAVTTKVMGEDGVMRNVISDETMEYVGILAKLELSPEEAEAAKKDMADMLDYIDKLEELDTSGIEPMSHVFPVNNVFRDDVVTNGDGSEATLANAPVKKDGGFKVPKTIGEMDLMSLTAVELGKK

SEQ ID NO: 2 - protein, 866859 aa, Eubacterium rectale (residues 577,907-866,859 of 866,859)
  misc_feature (181184)..(181234): Xaa can be any naturally occurring amino acid
  misc_feature (740872)..(740875): Xaa can be any naturally occurring amino acid
  misc_feature (741890)..(741893): Xaa can be any naturally occurring amino acid
  misc_feature (759161)..(759164): Xaa can be any naturally occurring amino acid
  misc_feature (805597)..(805616): Xaa can be any naturally occurring amino acid
IQAKEVTVEEAVKAAIASIKAKEEKINSFVTIDEEGALKKAAEVQAKIDAGELKGALAGVPVAIKDNMCTEGLLTTCSSKILYNFIPTYTAEAVKRLEDAGCVIVGKTNMDEFAMGSTTETSAFGATKNPWNTEHVPGGSSGGSCAAVAAEEVPFALGSDTGGSIRQPSSFCGVTGIKPTYGTVSRYGLIAYGSSLDQIGPIAKDVTDCATILEAIASYDTKDSTSVNRDDLKFTEALVDDVKGMKIGIPKDYLGDGLDPEVKSAILAAADELKKKGAVVEEFDLGLVEYAIPAYYVIACAEASSNLARFDGVKYGYRTKEYTDLHNMYKKSRSEGFGPEVKRRIMLGSFVLSSGYYDAYYLKALRVKALIKKAFDDAFAKYDVILGPAAPTTAPKLGESLSDPIQMYLGDIYTISVNLAGLPGISLPCGMDKNGLPIGLQLIGDCFKEKNIIRAAYSFEKTRELKRSIIAEEYSNKNTADTNKSAGAQMKNYETVIGLEVHVELATKTKIFCACSTAFGGAPNTHTCPVCTGQPGSLPVLNKQVVEYAVAVGLATNCTITQYSKFDRKNYFYPDNPQNYQISQLYLPICRNGSVEIETANGKKNVRIHEIHMEEDAGKLVHDEWEDVSIVDYNRSGVPLIEIVSEPDMRSAEEVIAYLETLRQTIQYLGASDCKLNEGSMRADVNISVREVGAKKFGTRTEMKNLNSFKAIAHAIEGERERQIELLEMGRKVVQETRRWDDNKESSHAMRSKEDAQDYRYFPEPDLVPIVVSDEWIAQIKAKQPELRPQKLARYKKEYDIPEYDAKILTESKHMADIFEAATKLCGKPKKVSNWLMVETMRLLKDNEMDADEIKFSPVNLAKLVDLVDAGTINSSVAKEVFEKIFSDDIDPEQYVEENGLKSMNDEGELKATIQAVIDANPQAVEDYHNGKKKAIGALVGQTMKATKGKANPAVVNKLLMELLMNNDDFKEVPDNIQDNKEETTNNIDNTNDNKSNDYEDVCYICRRPESVAGKMIHIQPNLCICNDCMQKTFDSMSNGNFGNLGNLGNISNMDFGNMPNISMINLSDLTGGIPNSQKLKKKKPKEEKKVEPILDIHSIPAPHRIKASLDDYVVGQEHAKKVMSVAVYNHYKRVMADNKHKAQEENTTAKQASNKYDGVEIEKSNMLMIGPTGSGKTYLVKTLAKLLDVPLAITDATSLTEAGYIGDDIESVVSKLLAAADNDVERAEHGIIFIDEIDKLAKKRNANQRDVSGESVQQGMLKLLEGSEVEVPVGASSKNAMVPMTTVDTRNILFICGGAFPGLEDIIKERLNKEASIGFKADLKDKYDGDENLLMQATVDDIRKFGMIPEFIGRLPIMFSLEALTEDMLVKILKEPKNAIIKQYQKLLEMDEVRLEFDDDALYAIAKMAKEKKVGARALRAIIEDFMLDIMYEIPKDDNIGTVTITKDYVEKKGGPLIQMRGTPELADSQHVMKIIHCADLHLDSKMTSNLSKEQAKERKMEILRTYSRMIEYAKNNDVKAIIIAGDLFDTRNVSATARNLVKDSITSNPDIDFYYLKGNHDSDNFISKLDEIPDNLKLFSNQWTSYSYGNITITGLEIDKSNQAAMYNSLVLDNDNYNVVTLHGQLGDEISTGDLKNKGIDYLALGHVHEYQSGQLDNRGMYCYSGCLEGRGFDECGQKGFVVLDIDDEKLTAGFSFVPFAYRSLYTLYVDVTGAMTTQDVAVKMEKAISDSEYSSRSMVKFVLVGEVDVDCEINTDFLKDMFEEYFYYEKVYDETRLLINYSEYEKDASLKGEFIRMVLGSDMTEEQKSEVIRCGISALSGEEIMKLIACHINNFGKLSDLNINFNDGVNVINQPNGWGKSTLAAFLKAMLYGFDTKKEPGAFERERKLYKPWQGGTYGGELDFEADGVEYRLVRTFGLTEKQDDFHLYRLATMVECDDFSPLLGEELFDLDRSSFKRTIYIAQADCMFSSSDSISAKLGNMAENTNDINNFESATADIKDMMNKMSPNRITGSIKKRVNTLTALEQELKKYQAADEAAAQLSQKIDEKTAQKKELTGIRAEYGRALQVASEDSRKQALRENYEQLCAVAKEKESIYNAASAVFGDKAPDEAELLEKTKQAGELESLKAVEDNLSFTPEEEQYLDTLSGMFKDGVPSDDGLDEMQKKIANIQSVKNEYSHMELKLSQMTSLAKMADDEEEPETPEKTKLVPVGIVLMVIGLLAAAVATVFSLNEKYNLKEIMFLVVGIAGVAMALCGVVMMVYGIRMNNKKQRAYIRLMAEREENIKQKEIPIQELKEQLEQIQSGITSMEHEVSQFFDSFSIEADESQYQEKLYELRTKAHDYSRFNEQIGKRAKTKADYEKAKASLDEYLSLYGYDSAAEYTQALSQMKKQLAEAGFAKENMDSALQKKAQFENDNDMDKLLAPNECPYTLDELNEMISKVEGSLDEIRASLVQYGRQMDDLQEQLDMRDEKEQEYRNCKQIQAEEKHKYEILGLTSDYLTRAREQFTARYMAPISNGFQKYFGILTENTDRNWQVDANISIRMKEQGQLRDVRTMSAGYKDLIGICMRFALVDAMYPGEKPFLILDDPFVNLDDEKLARGRRLLAVLSQDYQVIYFTCHGSREMQFIVSKKEFIPPVIAPDIIETLGDDYEIWTYEDYERLPPLLVGVYSYSAIPKCLAPLSTQGLVKSGVFRLQREFVPGLYGNGVYVVVIDTGVNYAQEAFMTPEGKTKIAVLWDQNTDTVYSEDEINAAILSENPYESIPGDEDGHGTFVASVICGNDRPQDDFAGVAPQAKLIVVKLKRAPQKLYDFYFIPDRKIVYSEVDVMRAVHFADEFAGQKGAPAVFCMALGCNNGSHTGAEDLSEYLDYITAKRGRAVVAAAGNEANSRRHYKGRITDTVDDIEINVEQDMDGFYLECWALSPELFTLSVISPSGQSNPAGVPMRIDSGEYSFLLEGTQVTIDYRQTGRQTRDLLIFIRFEKVVKGVWTIRVFPLSTIGGVFNMWLPMTGLLDADVSFIVSEPDTTLTMPSDAKLVITAGGYNSLNDAILLESGRGFDADGGIKPDLVAPAVDITGANLRGMYIALSGTSAAAAITAAVAALIMEWMIVRGNVLLANGVDIKNVMVRNCRRKEKTDYPNKIFGYGFMNGFANFMTKSNNLLADYAAKKQDICIKNDTISDSLFREYGVNRGLRDVNGKGVLTGLTNISEIVSFKTGEDGSSVPCDGQLWYRGYNVKTLTNNLRPGEFGFEKIAYLLLFGQLPSESELAEFTEVLGRSRTLPTNFTRDVIMKAPSKDIMNSMTRSILTLASYDPLVAKAGIDNNIRQCLSLVAIFPMLAVYGYHAYNHYENDQSMYIHRPDPKLSTAENFLRMLRADNQYTELEARVLDMALILHMEHGGGNNSTFTTRVVTSAGTDTYSAIAAAMSSLKGPKHGGANIKVMEMMRDIRSHVKHWDDEDEVRAYLRKMMDGEVFDHKGLIYGMGHAVYSLSDPRERIFRGYVEKLSVAKKRDNEMNLYNTIEKVAPEIIAEKRHIFKGVSPNVDFYSGFVYEMLGIPMELYTPLFAIARIVGWSAHRLEEIVGMNKIIRPAYKSVMKEIEMSFTKVKKGVCAAKGFVANGLNCGLNSDKNKNDLALVYSETQCQAAAVYTTNKVKGAPIQVTKAHLEASGHTAKAVIANSKNANTCNADGVEKAQRMCELAAAELSIDPNEVIVASTGVIGQVLPIEPIESHIKELAKGLSADGNDKAVNAIMTTDTVPKQYAVKFMLGDCECTVGGMAKGSGMIHPNMATTLNFITSDVAISSELIQKALSEIVKVTYNCLSIDGDTSTNDMVSIMANGLAGNTPITTENDDYQTFKDALYEVLSNLTRMLAKDGEGASKLLECTCAGAPDLDTAIIVAKSVIRSPLLKCAMFGEDANWGRILCAIGYAEADFDIDKVELHLRSTAGSIKVCENGAGVDFSEEEAAKILHEDEIYIDIDLHQGDVSAKAWGCDLTYDYVKINGDYRSMTKNALDMIDEKIVELLQENARIAIKEIAAQVFLSSPAVTARIERLESKGIIKGYHATVDSVNLGYKIKAFVNLDLEPVQKEEFYPFIESVENVIECNCVTGEYSMLIEVEFLDTEDLDDFINTLQKFGKTSTQIVFSTPVEHRGLPVHSGFDAMSKKLGFIGCGNMGKAMIHGVMASGEAQASDILASAKTESSREKNAAELGIRLTADNKSVAEFADILFLAVKPQYYEEVIAEIKDAVSDDEIIVSIAPGKSLSWFDEMFGKSLKVIRTMPNTPAMVGEGMMGVCANERVSQAELDTVLDLCSGFSKAEMIDEKLMDVVTAVSGSSPAYVFMFIEAMADAAVAGGMPRSQAYTFAAQAVLGSAKMVLETGKHPGELKDMVCSPAGTTIQAVRVLEEKGMRSSVFEAMMKCLDISRKMMSQAKVDKYKNEKANRKKTNARNKVKRVIARIVAAAAVVALVGWGGYSGYQYYEKSRPVNCYYADISAVSDYLQGLSADSEQMSAKTKIVVVKMKHVILTGVLLGILLLLIIFAATYYFSGDEPKPKVEETGMYTPGVYNTSVALGGAAIDVSVAVDSNNINSISLENMTDSVETMYPLVEPAMNELVSQIVQNQSTDNISYANTSQYTSKVLLNAIDNTLSKAKKSDTSNTEENAKTVSESQKEPGDSSKTENTSQMPLIMPIKDLRNTTEISNIAHKEQEPIFITKNGYSDLVVMSSELYDKFARMNRIDQAIFESEQEIANGAEAVDAEIVFAELEKKHFGMRAIESIFYHALDKYFPGMKNKYIRTYGNAYDCHGPNNERLLDLWDFMAKKKIITFPDYVIMIQLWKIVFYESNKSLRKESKVVQTKKQYMANEDKKDFNAMLHDSKDMPKFQIIIDQKSIEKYGGNKMYFAPPIDYDKVMKKVPYGKVITVGKIREHFAKLSGADFTEPITAGIFVSIVAWASYQRSEDETPYWRTLKANGELNAKYPNGIEAQKEKLEAEGHTIIQKGRKNIRYYVKDYENSLFDLKMQSTTNGGKALDRAFSFLLWGNQEEERKSVHFCSINAKGMLIFIVADIWNCYNMDMKKATNLKVLIIFKQPHCMEIRNRLSLKMEHYEKKISFLGENIQTIRKHRGMKQQELADKIGINMQSLSKIERGVNYPTFDTLEKIMDVLGVTPNELLSGEWKYIDHTEPYIMDIIKREQDFNVSLDYLSENEFFDDEKECTFYKAYKLIQYIHNYITNEVTELEELMEIKQLIQRQKLERMIKVHKEMRGLDRYREQPKEYKYHDPYDDWIFRQLADIDNRNNIPDTSPQVDFNEADYEDYLKAKWNRGLMILGLSDTEKKFKTAMDTAGADMTVVNSWLKLYVKTKKNSSGVAKRYYGVKTGLSSLLSDLKELEQQVIGYRELTGTDRKHFGELIKACKAKRGMFDDEFLISKVDTDFHTTLDSVVKQGERYLSSFDNGIILQSEIENLIHLTNEGLERKKPDLFALSYFYLGHSNKELAELNFTQKTKRVHEIYYEEFWKDILKQLEACVKQAEAINDKYEGTTDRRTARILSELKPLLVGVTKQWEPEQTAEYILRDMCRIFRDMDVIIWAIILGAVFYINKKSKSAGSKNTQPNKPRPQQKQMQQIWNSMQNTVQSGMNALNQTYQQKPQPQMQQRAQQPQRPQMQQRVQPQQRPQQSNPDIVQRAVKNNARFADDTTQKELETMHGHSEAQQRMTQEHSRNCQTLHTKAADGAKIIEAETQSMFGSVEDLIAMGYSGNLEFERDFLGEGLDMINNFMMDRTPKPGELYRHFKNKLYQIVTVATHSETGEKLVIYQALYDDFGIYARPLDMFVSEVDHEKYPDVKQKYRFEKITFKDKPEDMSGKSISSNTNEIAANASEAVSVQTQACYEPAPDADEGQAPDPRLLEFLDADTFEEKYNILISMRDIITDRLIDDIAVVMDVVVPEGPLQKRYDDLKNTIKTRQYYEFSNRLRMEIERKYLLKQLPSNLDSYASKKIAQGYLCTSPVVRVRRSNDSYYMTYKGAGLMVREEYNLPLTKEAYDHLVQKIDGRLIEKTRYLIPLDGGLTAELDVFEGDLAPLTLVEVEFDSVDAANEFTAPDWFGEDVTESGKYHNSYLSRLENSMIKVGIFMADGCEEIEGLTVVDIVRRAKLEIETISITEKSEVTSSHQVTFKTDTTKAQADFDSYDAIVLPGGMPGTLNLGADETVVKTIKRFAAEGKLVAAICAAPSVLGENHILEGKKATCHPGFEEKLLGAQWLEQPVVVDGNVITSRGMGTAIAFALELVRYFTDDATVEHIRQGLVYMAASSSKKASVPEAKEAMSRFKEEVASELGVPLKEGYNGDLTSKQAGSIGGEMVKQMIMKQEQQMKMSVQVENLEHNMAKLTIEVAAEELEKALDSAYQKQKKQISVPGFRKGKVPRAMIEKMYGAGVFYEDAANILMQQTYAGAVDESGVDIVSRPTVEVTQIEKGQPFIYTAEVAVRPEVTLGKYMGVTVTKIDTSVSDEEVDAELENQRNKNARTVTVTDRPVAEGDTAVIDFEGFVDGVAFEGGKGENHPLEIGSHTFIDTFEDQLVGKNTGDEVEVNVTFPEKYQAADLAGKPATFKVKINEIKAKELPELDDEFAQDAAGVDTLAEYKEEIKKNLTEKKETEAKKTKEDEAIQKIIDKSKMDLPEAMIETQCETMVEEFAQRIAQSGLTMEQYLQFSGMTVDQLKDQVRPEATTRIQSSLVLEQIAKEENIEVTDADIDAEVEKMAKAYGMEADKLKEYMGDAEKESMKKDLAITKAVDLIMDNVKERAKAKKKADAEESTEEMSLVPYVIEQTSRGERNYDIYSRLLKDRIIFLGEEVNETTASLVVAQLLFLESEDPNKDIHLYINSPGGMVTAGLAIYDTMQYIKCDVSTICIGLAASMGAFLLAGGAKGKRYALPNAEIMIHQPSGGAKGQATEIQIAAENILKTKKRLNEILAANTGKPYETIAADTERDNYMSAQEAAEYGLIDSVITNRMAGKNDGKIRCSFCGKTQDQVNRLISGPNGAFICDECIDICAEILEEEGVEGHEDKSSAKDDINLVTPEELKAFLDDYVIGQDQAKKVLSVAVYNHYKRVLAGDTSDVELQKSNILMLGPTGSGKTLLAQTLARVINVPFAIADATTLTEAGYVGEDVENILLKLIQAADYDIERAEHGIIYIDEIDKITKKSENVSITRDVSGEGVQQALLKILEGTEASVPPQGGRKHPQQELIPIDTTNILFICGGAFDGLEKIIDSRMDTSSIGFNSDVKSKTELNVGEAFKHALPQDFVKFGLIPEFIGRVPITVSLEALDRDALIRILKEPKNSLIKQYTKLFELDGVGLEFTDDAVNAIADKALERKTGARGLRAIMEAVMLDLMYRIPSDKSISRCVIDKDIVEENLKLDGDCVPEAYIEEKAASMEEQIMNMPAVALRGLTILPGMIAHFDISRERSLRAVEEAMEQDQKIYLVTQRNVDSEDPTQEDLYQMGIVADIKQVVRLQNDVVRILVDGISRAALLGFTGNEKYLEAEICYCDSNADSLPDDLREAMLLGVREAFHRYAAVVGKISKELIRQIDQYEDLEKLIDYVTNNLPVSYELKQQVLEAEDINDRYQVIVSLLLSQVEVISIKNELQKKVKVRVDKHQKEYVLREQLGVIREELGENADSEADEYEKKLSELDAPDYVKEKTKKEIKRFRNMSSSSSESTVERGYIETVLELPWNKMSVDNKDLDHAAQVLDDDHYGLKDVKERILEFLAVRNLTSKGESPIICLVGPPGTGKTSIARSIASALEKKYVRISLGGVRDEAEIRGHRKTYIGAMPGRIVNGLRQAGVSNPLMLLDEIDKVSSDYKGDTSAALLEVLDSEQNCRFRDHYIEMPVDLSEVLFIATANEVSGIPKPLLDRMELIEVSSYTENEKFHIAKEHLIEKQKSKNGIKKEQLTITDGALKDIIRLYTREAGVRSLERTIGKLCRKAAREIFKDSEAAVKVTKTNLKTYLGNPKYSPEKKNDHAEVGIVRGLAWTSVGGVTLEVEVNVLPGKGELVLTGKLGDVMKESAQAALSYVRSISEEYGIDAEFYTKHDIHIHIPEGAVPKDGPSAGITMATAMLSAITDRAVRADVAMTGEITLRGRVLPIGGLKEKLLAAKVIGIKTVCIPKDNEKDLEEISKEITDGMEIVPVERFSQVEKIAFVKMVIKSVNLETVCGITSTIPDNEYNEVAFAGKSNVGKSSLINALMNRKSLARISSQPGKTQTINFYNVNDAMYLVDLPGYGYANANIEIKAKWGQMIENYLHTSKKLQAVFLLIDIRHEPSDNDIMMYDWMVNQGFAPIIIATKSDKLKKSQIAAHIKTIKDVLHVKPGTVVIPFSSMSKEGRDEIWNLIDSLVFDEETLLAMKQEEAAKREAKSAAKRAAASQPHKKERWKKTGKPVAKKTKERRDKAKSKKSVNNHKKKMKNKCKFVGIMFLCILIVCTLAVMAYEHTAGMKGAAGGASNASGNTKNTDEADDMLTVVTSFYPMYIATLNIVDGVNGVRLENLSEPQTGCLHDFQLTPEDMKLLSTADVFVINGGGIESFMSDVAKAYPKLDVVETCEDVALLSEDDADSDHDHDHDADTESDSDHDHDHEADAESDSAHDHDHGDENAHAWMSVPRYRTMVQTIASRLAEKDAKHADEYYANAKAYDAKLAVLEEKINSIKSLTNGQNIIIFHEAYAYVADDFSMNACYLLDLDEERSVSAGEIKQVIGAIKDDGVSVILAEELYGKSMGDTVSRETDVHVIYIDPLNRGEYDKDSYLDGMEHNIELIKEAFTKMRKIIQPCGFHCIKINNLGVSFGEQTVLEDVNMHIHCGSFNVIIGQNGAGKSTLIKAILGEIPHTGTIEFKDTKDGHMAKLKIGYVPQSVNIEKNTPVSVYDLIASYQYNYPVFLPKSKKIEAKIRETLEVFEAEELIDKQVCNLSGGQLQRVLLSMAIMDEPNLLLLDEPVSGIDQNGMELFYKTMDYLKTHYDLAIILISHDLDYVAKYADHVVLLDKTVAKQGTVKEVFESKEFERIFYTGEESWVREEEHKMNITSWLQYDFMKNALIAVLIITPLFGIMGTMIVNKKMAYFSDALGHSALTGIAVGVVCGMADTSLAMVIFAIVFALLLNKIGSLNTASTDTIISVFSSCSVAIGLAILSKGGNFSKYSSILVGDVLSITKTEIVYLIVIFVVTIVFWVLCFNKLNAICIHRSVAKSKGIHVRLLDNLFAVLVALIVMLSIKWIGILIINALLILPAASSRNISENMREYHFFSVIFSVFSGIVGLAVSYYTNVATGPMIVIIASVIYFSTFIFGRKLKKMGSNNDISLKALAKINLGLDVVRRREDGYHEVRMIMQTIHLYDRLDIKRTKEPGIQIQTNLSFLPVNENNLIYKAAKLLMDEFSITDGVSVKLDKRIPVAAGMAGGSTDAAAMLIGVNRLFSLGLTKKQLMERGVQIGADVPYCIMRGTALAEGIGEALSPLPPMVKCPVLIAKPSISVSTKFVYQNLKLDDTTIHPDIDRLIDDIKDDIKAKNLHDIAAHMGNVLETVTIPNYPVIDEIKKHMLSNGAVGAMMSGSGPTVFGLFDDEDTAKKAYKAMRSSHLARQVYLTSVYNNRKMTDNLTLNMDAYLPLRDVVFNTLREAILKGELKPGERLMELQLASKLGVSRTPIREAIRMLEQEGLAVTMPRKGAEVAKMTLKDMEDVLEVREALDELAAKIACKKISDEQLANLKTIKDEFKRSMDSGDVKKIAEEDVKFHDAIYEATNNAKLVSMMNNIREQMYRYRVEYLKDPKNYPMLVKEHDAIYRALEARNMELVTTEMHTHVANQAVAVKAVIQKQDEEKKMTTNIDENIKSFRQIYSDCSDIKMQEMYLGRDACIKCFVAYIEVTCAGSGINNSAFGRFTSYLEGIDRNQVKEVLDKNQAALSEFAHLHTVREAAQMMLTGDVIFFVDGYPDAFKLPDKGYPAMSIQEIDSEKVIRGSNEGFADSIKINTALIRRRLRSTRLKCKEVKKGLRGHSNVDILYVRDLVKPGLVEEVEKNLDSYVIDHVGDSGVLEQFAEAKWYSPFPQLQTTKRPDVAVNALLEGRVVVLCDNSPIAIILPTTMNNFLKTADDYYNRTIAASFARLIRYVAAFMSFTLPGLYLAVTNFHTQILPTPLILAFYEARLGCPFPQLIEVLMMELSFELLREAGIRLPGAMGNTIGIVGGLIIGQAAVDANLVSPIVVILVAFTALCSFAIPSEEFAFSFRILKFAVIIMSAWLGYFGFLISLMVILLHLAKLKSCGYPYMMPFVGSELTGGEDEKDSIIRFPLRRLWRRPVFAREKECRKLKGNKYDMTKNMGKRDTFAQNESISPRQLYRLYVFNLLGVGTLVLPNNLAKLGKYGFISIALGVFMAWLFMWIVSEVREQKKSIYDRSFGKTAHAKMLIYDLIIAIYELSQAAFLAWIFVKLIRDSLIPDESFTVVLLVIMAVCAYALSGGVECRARVYEVVFFFVLIPLAAMLLFALSDVRFDYLMIKDRVGVDFGIADIFAGAYYVFAASISVFNILFVRERTASQIRWSVSKAILTYAGILFLLYAVLLGSFGKYSLSEIEFPAVVLMSDVQIKGSFFKRADALMLSVWFFTLFSVLIMSLYYAVLRCENFAENTGKIIFTFNKNRHSCSNKQFSSDKQKSHDKEKSTMRSWCIIFVIAVTLTLAYILESGDEIVKKYLGFLMCIAIPVIVVLTIGLMLTGCSAVELEERCFPTLAAVDVVAVDTDEITDKEVTGKDVTDYKEYVSHRDDLANESSGYIEFYYNMDKSYEPEYADDIKTAVDSFEERLSQKADTNHLKVILIGKTLRNDKAAYASFMEYCKTSKKFPRNTYVCIADDINDIFDNMGDYYEQKMNKENHEDGEPIITLGTLLDDYTNETHGAWMRKKIIITTIAIISLTAAIAAKNHTPAANTNSIACTADMQKSIAGKILRFHVLANSDSEADQNVKKQVRDAVGAYIEPYLLECENIEQTRATVNDHMDEIIAVSKETLAANGFTYGASAELTHTDFPEKTYGDYTFPEGNYEALEITLGDGAGHNWWCVLYPNMCFRGSVYEVVEDEAKENLKEVLTPDEYESIFDSGKYEIKLKILDIFRMTKDVVVSLKGLQLAPDQQSDAVEVIAPGEYYIRNNKHYVLFEEIMEGETQTLKNMLKFNENYLEFTRKGPMSVHMIFEKGKKNLTYYYTPFGSIQIGIDATSIEVKETEDEIRAEVKYALDVNYEFVGDCHINIAVKKKGAAVKIAMNPALIVLIVIAVVLVVAFIVLTILGKKAQKRKEEQDEQIAAASQTVNMLIIDKKRMKLKDAGLPQQIIEQTPKLMRRSKLPVVKAKVGPRVMTLIADEQIFDEIPLKKEVKASVSGIYITAVRGIRGPLEKPKKKKGFRARMAENYSKANEQLKAEEAAKAERKAAKAAAKKAKQKMKKIALLADGWRRYVTYSWVEGIMEGSKELGLDVCLFFYNTNGTWSQDPKFNKGEYALNDLPDLNSFDGVVFDCTNTINQDEIHYMVRKLQSVNVPVVSIGYKVDGFYYVGNDSKRLFRKVMDHMYYAHGCKSFVFAGGPPYHYENRMRFEAFKEALSDYGIPLTADMYMFGDFDYQTGVRYMSDWHESKKPLPDVFLCANDNIAAGLCATAEVLGYKVPQDFKVTGFDNLDKAAYFNPQITTVDNNRGNIGRNALEIFKALWNGTGDASDKYLDSEFIPAESCGCPNTGRVDYRNYIKNIIKGSVAREQEEDAVMILQKELEECNEYYDLFERYSDYIQSMKCDGVYVVGVSDLAAARNNAHFRKHGYDIDDEVVLYADDKDNGKLEFKSVNDLMQYMQSVDKNTCYMYCSLHFRDEIVGYVILRNPEFLYDHPEQFDIQSALLKKLENLFKQKVLENTNNELKNLYNHDALTGLYNRVACNEMVIPMFAELEDQNVGCTIVFLDVDDFKDINDTYGHKYGDELLKTVARVLDEQKPEGSMVYRFGGDEFIVFIPGDRHDTAEKYIKRVYDIMEQHSLFISHGIIYTKPGSGKSFDDYLVSADTKMYQLKQQHKQKKDSNFLKGVDISSVPMMVDNNIQIMDREGHVCRVFDFLKLNNVNSVRLRIWNEPDKVPESKGYCSLTYVLEMAHVIKKYKMHFLLDFHYSDYWADPRQQNKPDAWKNLSFDELKEAVHKYTYDVLYRLKIMDCAPDMVQIGNEIRSGMLFPDGAVPQYRQLAALVNEGIRAVRELLPETKVMIHLDQGGRYNCIMPWLDSMFNAGMLPIDAIGLSFYSFWHGTFMDLKDTMSRLIKLYNLPVYIVETAHPWRHCKGDHISKELMETAGLDAGSAEQKKSLEIIMQIAAEVSKDTGKTGVYYWEPVGVPGKGMGTWFENMGMFDEHGRALRGWDAIRDFDPKNPPIKELDKYIESLYEYEETPEVEDFMKLLMIHGNLISNPEFKDGFNNWQIETSLEERQYTLGKDGVFISSDANFDYSISQTVDIEYTGEYIAAVDYRGTNTTGVEVELFMDVEDESGVHTYTSNIFPADVRFVTHLLKPVRLQKNARVTVGLRMHTPPVFAKIKKISLVVIMSEKKNTGKKAVIAVIVIALIVVIIALVAVISGKSKKGGSKSATEAGTEAGSETMRSGQFDIDYAKQVTKLADYSGIAITVSNDYEINDTAKQKYLTNVLQSYGADAYKQVTDRDTVADGDYVKVDYTGYKDGKAFDGGSATDVMLDVTNNSQVGGSSFIDGFTKPIIGAKVGDKVKGDVTFPEDYGNDDLNGQTVTFEYTVKGIYSADPVALADMTDEQVNTVFGKAGVTTNAQLTTQIEKDLKQQLYSAEVDKIKSYMIENSTVEIPDEYLQARLNEYIASFTKENVKDGQTLKKYLKSNYNMTVDQATEKWKENLTEQIKTEFIFGLIAEKENIKMDDDAFNSYVDYIVSASNGQFSKASEVYKYFGSGHKDEGKTYLKNQYLVNKAIDTVTEKANVTFEDGSAAPDTSSGSADAEMELTNIREIFRNKDKFADKEVTIGGWVRSNRNSKNFGFIVVNDGTFFEPIQVVYGNGLDNYDEVGKINVGAAIIVRGTLVLTPDAKQPFEIQAAEVTVEGASTPDYPLQKKRHTFEYLRTISHLRPRTNTFEAVFRVRSLCAYAIHKFFQERDFVYVHTPLITGSDCEGAGEMFQVTTLDLNNLPMTEEGKVDFSKDFFNKPTNLTVSGQLNGETYAMAFKNIYTFGPTFRAENSNTTRHAAEFWMIEPEIAFADLEDDMMLAESMLKYVINYVLENAPEEMAFFNNFVDKGLLDRLRNVVENDFARVTYTEAIDILSKHNDKFDYKVSWGCDLQTEHERYLTEQIYKRPVFVTDYPKEIKAFYMKLNDDGKTVAAVDCLVPGIGEIIGGSQREDDYDKLLARINELGLSEDDYKFYLDLRKYGSARHAGFGLGFERCVMYLTGMGNIRDVIPFPRTVNNCELMWRKIKGPVITICIMHLTALLCLIILSIVQCFVDMAEWIKFALAMAVNIVVGLVCGFLLKCCFHRRRFIRVTVVAYWITYVIATVVIDIGESKNIFELLIILLLVMFSALVFRMKHVKTLNTRKLQNTVKKGGCGECQTSCQSACKTSCTVGNQTCEQYKMVHQYKNNGYNIVLDVNSGAIHVVDDVTYDVIELFEDNSAKEIIEKLVDRYPQTEIEEAIQEVNELKDNEELFTEDTYKERIIDFKKRQTVVKALCLHIAHDCNLACRYCFAEEGEYHGRRALMSYETGKQALDFLIANSGSRRNLEVDFFGGEPLMNWDVVKQLVAYGREQEKLHDKHFRFTLTTNGVLLNDEIMEFANKEMDNVVLSIDGRKEVHDRMRPFRKGAGSYDLIVPKFQKFAESRHQDKYYVRGTYTHFNTDFSKDVLHLADLGFKQISVEPVVAQPTDEYALKESDLPVLFDEYDRLAAEMVKRNKAGNGFNFFHFMIDLEGGPCVYKRLSGCGSGTEYLAVTPWGDLYPCHQFVGNEDFLMGNVWDGIKATDIQDEFKCCNVYAKEKCRNCFARFYCSGGCAANSYNFHGTITDAYDLGCELQKKRIECAIMIKAAEADMADDAQMTGRYKKMKKGKSWVIILVAVICIGLLGWYSTAVITDTKQKQEATANGESTKDKDYQNIKLGLDLSGGVSITYHIKDKNPSDKDVNDTIAKLEERAESYTTEYSVYKSGDDRITVEIPGVDDPNKVLEDLGSPGSLYFIAQYDSDGNANYTQDTSVEGGYKLNYDIDTLKANGSVILDGNDVKDASAQYDQSSSTSTKEPVVSLKLKDKAIDTWADATKKAKDAGQSIGIYYDDHFISVPTVSAVISDGNCVINGMKDYDEATSLATFIRVGAINLQLEELESNVVGAQLGGTALTNAVKAAIIGIILIMIFMIVLYGILGVVASIGLALYSMLTVLFIYWFEITLTLPGIAGIILGIGMAVDANVIVFARIREEIAGGKSVLAAVNEGYKKALSAILDGQVTTFIAALVLMVLGSGTVKGFAYTLMISIILSLFTALFIAKYLTRAFYGVGVRAEKFYGKAKKRKVIRFVQNRVKYFVISGVVILAGIGGMIYFGATSGNALNYSLEFVGGTSTTADFGKDYTAAEVEKDIVPSVSKLLGNSAVQVTTVQGSHDVTLKTRTLSLDERQDLAALLEKDFNVDASTIETQSISSTISGEMRTNAVKAVIISCIFMLLYIWFRFKDIRFASSAILALVHDVLVVVTAYALIRISVGSTFIACILTIVGYSVNDTIVIFDRIRENLHGIKKYSADELADIANESLTQTLSRSINTSLTTFVMVLLLFIFGHTSIREFSLPLMVGVLCGTYSSICIATELWYVMKLYLGKSAIKKQAAAPAKVSKKAKNMKIFLIYLLLMNIAGFAAMGIDKCKAKAHAWRIPEKTLFGLSLLGGSAGTWAGMYAFRHKTKHWYFVKGMPLIFFIHVVIACVVYRNFYMWAYESVFYQIYPLGFCGAPFENDGVLEHRILKVNDWIPHIKKLGADAIYFSPVFESDTHGYNTRDYTKIDTRLGTNEDFAQVCDNLHKDGIRVVLDGVFNHVGRGFWAFQDVLKNRESSPYVNWFGRIAFDGNSNYNDGLWYEGWEGNYDLVKLNLRNEDVIQHIFSAIKGWVDEFDIDGLRLDVAYCLDHDFLRRLREFCDSLKPDFFLVGETLHGDYNQIMNDAMLHSVTNYECYKGLYSSFNSMNMFEINHSLLRQFGPEQWTLYKGKHLLSFVDNHDVTRVASILTNEKHLPLIYALAFGMPGIPCVYYGSEWGEKAKKEDGDPALRACFEAPQWNELTEWISKLTEAKKQSKALCYGNFYSVVLTNGQCVFGRECDGERVFVCINAADQPFFAGFDMGKGDATDLITGEQITLNGGLELPPYSAYFLRMDNKGKNKRKNGRKELICAVTAVVVLYTAMESIGITCPIKFITGISCAGCGMSRAWMAFLQLDIAKAFAYHPLFWLVPIAVIVLLCKSKINIKIYKIIIFTIIIMFAIVYICRLIWSGDDVVVFEPEKNILFRIIRVIKSKMFCEKCGKEIPDSTKFCPYCGAAVSKAQDFVNKAGEVFNAAEQELGSAFDEVKQSFTGNSANQQNAGGQYNGGYQNNGAGQYNAGYQNSGAGQYNAGYQNNGAGQYNTGYQNNGGQTPPPYRGEKLKDDRGLASYIILSIITCGIYGYYFIYKMAHDVNIACDGDGENTSGLVAFILLSMITCGIYAWYWYYKLGNRLANNAGRYGLVIQENGTTVLMWCIFGTLICGIGPFIAMYILIKNSNMICNAYNRTHGFMMSEFKNLTLDVADQIAVLAISRPAALNALNSETLDELNVALTEIEARDDVKVLILTGGPDKKGNEFKSFVAGADISEMVNFTAPQARAFGIKASEPFFKLMNMRQVTIAAVNGFALGGGCEISMACDIRIASENAIFGQPETGLGIIPGFGGTQRLARLVGMGRAKEMIFTCDNVDAAEAYRIGLVNKVVAKEELMPTAKAMAAKIISKGSYAIAVAKAAINNGYDMDIKNAVEMEANLFGVVNDTNDKKEGMGAFLEKRAANLTDFMPVATERGHGLGTKSIRQTAERLGGKCQYSVSDTMFIVRVIIMKSRATQTKELDMVNGPLARKILIYSIPLMFSNLLQVFFNMTDVAVVGKFAGARALGSVGSTTIIITLTTGILLGMGGGVNAVTALHMGAEDYQRVHKTVHTSVILCFIAGLLLLVAGLAFSKPLLEVMNTKPELIDGATAYLMIYLCGSPALALYNFGNGVLSAVGDTKRPLIYLSISGIINIVLNLFFVIVCRLGVIGVAIASIIAQYISAALIIRFLMKTYGSYGLRMKDIGIDRDAAAAVLRIGVPAAIQYSLFAIANICIQTSINSFSHVVVEGNSAATNADSLIYDMMAAFYTACTSFIAQNLGARKKERVLRTFFITLAYSFLMGLVLGVALFIFQRPFLLLFTSDDAVIHYGQIRIGVMAFVYCVSAFMDNATAAARGIGKSVAPTIIVVMGSVVFRIIWLLTVFAYFKTLQSLYLIYVISWTLTAIAGNIYFAYHYRRIMSGETKEVFGSNYGQNDVIINGLIEKMTLFDDNLMSLVFGQNIETTELLLRVIMERDIKVIDVRGQDELKNPVIGGRCITLDVHAIDVDGRHIDIEVQINAEGSHVKRARYHSSMMDARMLEEGQEFKEIKDSYVIFIYDHDKFRKGLPFYHIQRRVDETGEAFGDGSHIIYVNGRYEGNDDIGRMMRDFHQCRPELIKSETLSKAVAYYKEKEGRGAMSEAVRKYAMEYAKEYAKEYAKEYGEEQRREGMKAGIKTGIETGIETGIQTGRRTEIFLSVQDGDYSVNRGAEKLGMSVDEFEKSMSEAGYRVPELVMENSNEKEDMRALIMVFVIWLLLWCVDNRQYFFEYLPHHSDYEIVAAYKAFNGDMRDNIIRVYVPDRDNAIGYIKADYTDKEEKPIYVGYSKERSPHVVRKTPALSKGMILAGGIIPAAIVQYFFRKKHKMPHSTRPNSEKYEKILEALRTLLETKKISQISVSEIAQTAGIGKGSIYYYFSSKEAIFDALMAKSYEEPLATAKELAKRTDISPFVRMAMIFQACRNSSAAFLKIQSDAGNGVQENAFLHNKYINYLITELKPVTGEIIRQGAAEGLIVCQQPDALAEIVLLVLVVKLDNTLIPSTKEETEQTISELISLLEKGTDNPEGSLNFLRVMTYADMFSKVKGLFMESDVSDISEHLAFQFNITGEAEGIFYAEVKDGVLAVEPYEYFDRDAIFICSAETLFKLAEGRLDPSLAFTTGKLKVEGNIDKALRLKQIIDSKKAMKMKWGIIAGVLGGIAAAEAGGSAYFYRRTMMRYNAKKERTMKMSGVDWESYYSFMKPRGEWMRAQTHEDVWIRSDDGLRLHATYFPGIDGGNPDKAVICFHGYTSEAMSDYSSISNYYLKKGYSMLLVDARAHGQSEGKFIGFGCKDRYDALKWIDWMIKKAGNGIRIVLMGNSMGGATVLMASGLNLPEQVKGIVSDCAFTSPKAVFTHVLHSMYHLPAFPMIQIADFVNRKMAGYGLDECNAAKEVQKAKLPILFIHGDKDTFVPCSMCDELYASCASQKTKLIVKGAGHCESYYKNTKAFEDALDKFLEGVMRMKTRKGHNVYPITVAQKFHLYYAKYCPNMAVLNIGTSLTIGTELDWNVLRDSINYAYARNEAMRIRFTRDKDGECYQYIADVDEDFKERTVDFKDFTDVTMEEAENEMQGWTQVPFEFEDSPMTKIVMIKMPDGFNGVYFLGHHMVVDAQSLIAFLKDIIEIYCNAMYEGVPFPKDMCSYIEQLKKDLAYEAGSKAQLRDREFFEKLIRQSEPIYNGIDGTAKLDAARELMHDNKLRSAFNASDDVTSALDIFHLEAEPTKRLMDFCEKYHVSLACLLLMGIRTFFQKENGFDDVSVNNAIARRATLKEKRSGGTRIHSFPFRTSFSKDVRFIDAVYTIRDKQNELFRHANYNPTEYFALRSKTYPQPKAGLTYEPMSLTYQPMTLKEKGLKDLGDIKYKTKWYPNGMTTQAMYLTVMHRPEDNGLDFSFEHQVKAVSRKQLEYMYYYLCKIMFKGAENPELTIGEIIKLVMFDELVEIICNYVDVQPADVHEESRFMEDLGFTSFDFMSMLGEIEDTFDVEIDQTKAAEIRTVQEAIDYLETLKDAMLFHTIPEILSYAKKTYGADDAIRWKKSKNEIESRTYSELKNDIDSFANAIEKLGKKGQHIAVIGPSSYKWIVSYLAITESGSVAVPIDASLPAADICELLDRADVRMLIFDEARSDVAEAAAKSCHDINVYVSMNSTEHCPQVLSFNGLIDDNRGSYEPAVAEDALCTIMFTSGTTGKSKGVMLTHNNLAENATCLDMKIGPHTVILSVLPIHHAYCLSMDILKGISLGSVICINDSIMRMAKNIQLFTPDMILMVPLMIETFARKLEEVRAAGLPAEPVRKKMFGERLHTICSGGAYLNPDYVDLFAEFGITILQGYGMTECSPVISTNLSWDIRKNSVGKLMPNCEAKTVDGELFVRGTSVMQGYYKMPKETEETLSDGWLHTGDLGYVDEDGYIYLTGRRKNLIITKNGENVSPEELENALSVNHLIKEIIVRESEGVIEAEIFPDSEYAQNAGIADIRPALQELIDEYNVNAPEYKRIYSLKVRESEFEKTASRKIKRSMHNQTAILFFYKGKKMKLLSFAIPCYNSKDYMEHCIESILPGGDDVEIIIVDDGSKDETAAIADRYAAEYPDIVKAVHQENGGHGEAVNTGLKNATGKYFKVVDSDDWVDLDSYKKILDKLREFEQENTQIDMLLANYVYEKEGAKRKKVMRQTGFPRNEIFTWSDIKHIYKGHYILMHSVIYRTELLRSCGLKLPKHTFYVDNIYVYKPLPYVRTMYYLDVDFYRYFIGRDDQSVNEQVMIRRIDQQIRVNKIMFDDVKLHEITNEMCRKYMYSYLEIITTISTILAIISGTDENMAKKDELWAYMKEHDEETYKKLRHGVMGQLTNLPGKGGRKVAIGAYKLSQKVVGFNMMTTRELQDEIIRLKKENDICILAHAYQSHEILEVADFTGDSYGLSKQAATAPQKNVLMCGVRFMAETCKILSPDKHVFLSNSAAGCPMAEQLDVELLQSLKAENPDYTVVAYINTTSELKTICDVCVTSSSAVKIVKNIDNNKILFIPDCNLGAWVEEQVPEKTFKFVHGGCPTHLRMSIADVERAKAAHPAAKLLVHPECLAEVSKAADYIGSTTGIIDYAKNSTDREFIIGTENSILQHLQYECPEKSFYPLSKDCVCHNMKLTTLMDVYNCVKGAGGEEIILPDDIRTKAKACIDTMLTLGEMNTDVLIVGSGCSGLYCALKLPRDIRITLITKSDLESNDSFLAQGGMCMLKEQSDFDSFFEDTLKAGHYENDKESVGIMINSSPEVVKDLVSYGADFARNDDGSLAYTREGAHSHNRIIFHEDVTGKEITSTLLAQVKKLSNVTLMEYTTMVDIIERDNKCYGAIIRKQDGTLEKVTAAYTVMACGGVGGLYRFSTNFRHLTGDSLAIAKKHGIELKNPDYVQIHPTTFYTKKHEDRSFLISESVRGEGAKLLDKNMNRFVDELLPRDVLTGKIREQMKKDGTDFVWEDLRTIPRDELVSHFPNIIEHCKDMGYDVFKEPIPVVPAQHYFMGGVKVNHHSRTSMESLYAVGETACNGVHGRNRLASNSLLESLVFAKRAAGQMAELGFVNDEIAAKKAADSIDLADYSDEKAVEREYRKLAMEAIEGRTGAQDMNAESGVTYIQAMYDQVTLGLNVDPFILSALKEDITSEDVSTNSVMPHPQAGEVDLICKQDGIICGLQVFERVFTLLDADTKVEFYVKDGDRVENKQLIGKVYGDIRVLLCGERTALNYLQRMSGIATYTSQVAALLEGTGIKLLDTRKTTPNNRIFEKYSVRVGGGNNHRYNLSDGVLLKDNHIGAAGGVKEAIAMAKAYAPFVRKIEVEVESFDMVKDAVEAGADIIMLDNMSTELLKQCIDYIDGRAEIEVSGNVTKENIARIKGLGVDYVSSGALTHSAPIMDLSLKNLHAVMNGDERRKKIINILSSSKSPVAGVALAKELDVSRQVIVQDIALLRANGAAIFSTNRGYLIQADKQYSRVLKVVHEDDEVEEELSTIVDAGGHVKDVFVYHKVYGVIRANMDIKSRRDVRNYLEEIRTGKSSLLKNVTSGYHYHTICAESEEVLDAIQEELKQKGFLAKLQDYEPVDFWGDNEDEAKAMIIHEITEECFKKYGKVIDSIDLTELVSTMQTVEIPADVVYEPSISALEKLKCATELQQKTYGELPIQIGWCIGNNHKLNAVEYHRCSEVNIAATDAILILGRQQDISVENTYDTSLMEAFRIPSGTAVELYATTLHYAPCNASAGGFLVAVVLPKGTNEALEHPHTGGEDALLAAKNKWLIGHPEGGLPEGSYIGLTGENLEIKMKKRLVSAAVTVALFIGLIAGVTFQSSDKKEIKHFTAFFSVEGDNIDPDNDIKQLIAEQIGAECEETWLVGQDKDDAINSLIATGEYPDFVLGETALYEADALIPIDEYWDDYPNIKEYLSDEQWEKLRQPDGHIYWIPPFGISHGDDVEMLHNGEAFWIQTRVLKWAGYPKITTIEQYFDLIESYVQANPTMPDGTENIPFTMLCDDWRYFCLENVPQFLDGFPNDGSCMVDTETKKVMDYNVTDTAKRYFGKLNEEFRKGIMDPGVFNATYDQYLDKLSTGAVLGMVDQWWQFYYVIDPVFKKQNLAQLGCDYVPLPVTIDDGIHNRWHTNRMAEIDYSSGVSITTSCKDIEGAMKFVSDLLESDIIRERFWGEEGKDYSVDENGLFYLTNEQAEKKSDSSYKAAHMCSYSYFPRVEGMLDDGINAFSTEFQQNEFFRNQPVDIQECFEAYGVENYVDLLGKNDAPGSWYPMYSYSDSIPSTSECGKVKNNIVAVKKIWLPQVIMADDFDAAWNQYMDEYNACNPQIYFDYLQQKVNENMDDLKNGALYIGTIPSSMDNNRCSVTLEDDGSVTFYIYAPNANKVEVAGMGGYFSSERIQLKPDMQGGFSANIKDFHWAMHYYFWYVDDVCITNPHAAISYGCFAAINTFEVPKEGEDFYFVRDVPHGTVSLCKYTSQVNGHIKESYVYTPPGYESGDGRYPVLYLQHGVGENETGWVWQGKMNFIMDNLIADKKCVPMIIVASSGYSFKDNEYPVFFPGDFDSELVNSIIPYIEENFKVKKGRNNRAVAGLSLGSAQATDIAARHPELFSAVGVFSGVAIHLMKKIIDSPYRFEAVFMSAGDEEKEILLGINEMVKEFSRQGKDSTPKVYEGYHEWHVWRKSFKDFAQMLFTWDDAELDDINKAVPVRSKNIDSTTPVQADESMVFFDPVYRQIQFENDEDGKPAGKYPDVIHGIRVTEDNSIEVNLFAPDAKSVSVVLENGTEELLYRSKKNDGYWEKTIGNPAEGFNYVTFMVNGTPVVNPAAPVGFGYNRAVNFAEVPERNFSWHELKKTDHGQIHIHYSCDGDGQVSMNYVYTPAGYGEDNCDTGRVCVLECAADERNFCWIHQGKIANIMDNLSGEGRIKGIMIIMADSTISDDIIGNITAIYGIKDSAQKEWFKKGDNESWTSCRHRFVNLMCGIQMAGAYKTGKYRNIFKEYGYPEEEIQKRVEDTFNTIFYGNDDERFYHEAGDDMGYMEDTGNHDVRTEGMSYGMMVCVQLDKKAEFDRLWKWVRTYMYIEDGPAKNYFAWSCQTNGKRNAEGPAPDGEEYFAMALFFASKRWGDGDGIFCYSKEAQNILRECVHKGEPGHSGEPMWEPSNKLIKFVTNMDFSDPSYHLPHFYELFAERAYEEDREFWKEAAAASRAYLHSACHEKTGLSAEYADYDGKPHTGHKEIFGRHDWYYSDAYRTIANIAMDHLWFDADPWQIKTAERLQKFYCEDQKDNWDGVFLIDGTPLDEKALHPVAIIAVNAEASLAADGKYAKQCVEKFWNTPLRTGDRRYYDNFLYMFAMLALSGNYRIYMKRKKLLKQGACIAVCSTMLATGVTQLIPAYQAQSLVFADEVQQNIKKTTYTADKLTVDWGNAGYELTDGVWKVTFNNQYDQVKWRLPETVDMSTVKSVTFNVKDQKGSVSLKVYKNGDEDADGANTKYELTGADEYSISPTGEGDMVAVGLMTTDNAGSGSAISLVSVTVETDTTPKTPPEIEQNIEDWKKSVTSSDALGENAIAGTGIMLDEIKDNTLMDLVEKHFNAVTFGNELKPDALFNYQLEKSVKTKTVQFDGQDLEVPMVNDAGDSLDFSRADAMVDKILEWNAAHPDRKIRIRGHVLVWHSQTPEWFFHENYDISKPYVDKETMNRRLEWYISSVFDHYFGEAANKKYDGLFYGWDVVNEAVIGNTYRTDTVSPAESLDEIRHGNNSSWWHVYKSNEFIINAFKYANKYAPSDVELYYNDFGETDNIKSEGIIKLISDVKSAQGTRLDAFGMQAHYSVDSFSAAQFKTVAKKYAEAAGKVQLTELDFQASAAYKSGAASKESEYTKMAYCHKQLFDAAKDLKKNGTNVAGITVWGVIEPNSWLHSQSNVGGGADGSKQCPLLFDGKYKAKPAYWAYVDATKLEPLIQDIVVAEQKGDTMSGTEYSFSDDDTQAAFIPTWDKDGLNVLVSVKDATINDTDEVTVYVDETNSAGDVTPVKKTVKRSEAQAVDGGYRATIKVPMTDLKVAKTIGMDVKVMNNDKAVSFNDLKEMQETSSKYYAKATLKPGIEKATKATVKIDGEADSEWDKAVAIPLTINLGAKVTADAKVLWDDENLYVYATVKDPVLNKDGGEAYQQDSLEVFIDENNAKTESYDDDDKQYRINYENEHSFNGKKCLEENVQSAAKVTGDGYVIEAAFKWTDIKPKKGDRIGLEFQINDADASGARIGTLSWNDETGMGWSKSSVYGTIELAAEAKDEVSDDNSKPGTDDPSTGNTEKPGTGKPAINKPSADKPATGSTNKPLANKPAAKKAAKTSDQSATAAFIVLFLAGVSMAGASRLRRSRKQSMAGPKAPKDPERKRPYFYIMKDKDIYGSVQEDGSIIHFIYESDGRLINSAQIAGNIENKEELGLLETVEGFGRLVHSIGVSVETDNQNEQIEFVFQMYGKQDLYGGGTNLKVKLTGDGMEKKIYLSDYKWTPDDDIPGQIKFIFNTPDIMGKASVRLYLNDGYEAPADIEETEVDMNSDEYCRMISHSLMNMGNAYRIRKAIEKTRAGKEVTLAYIGGSITQGAGAAPINTECYAYKSYQLFQKRFSAKNNVKFIKAGVGGTPSELGMIRFDRDVLRDGQQPDIVVIEFAVNDEGDETKGDCYESLVRKVLNLPCKPAVILLFSVFANDWNLQDRLSPVGKLYDLPMVSVLDAVSPQFALKNDEGRVITKNQFFYDMFHPGNAGHSVMADCIEYLFEKIDQAGHASLDAFELGLTEEKILQEKLNLAPVIGNSFENIRLLDKKDIYAKAYIDEGGFDSTDTQLQSVEMDAQLSLTPEFPYNWMYDGTKNTLNRVKAYFELEMECRALLLVFKDSGEVNVGKAKVYVDGEYHFTADPHINNWQHCNAVIIFNNKTSENHVVRIEIAEEDRDKQFTILGFGYVLMVTAKNPILSGFYPDPSICRVGEDYYLVTSSFVYAPGVPIFHSRDLAHWEQIGNILDRPSQLCVENEEISRGIFAPTIRYHEGTFYMITTNVSHGGNFIVTAQDPAGPWSDPYYLGEEAVGIDPSLFFDDDGRCYYCGTRPNPEGVRYNGDWEIWIQELDLGTMKLKGRSMAIWKGAVKGCIWPEGPHIYKINGYYYLMHAEGGTGPEHSITIARSTELFKWFEGCPRNPIFTHRNLGMDYPVIYAGHGDLVDDINGNWYVVMLASRPCKKHSSMGRETFIAKTIWENEWPVIAPGIGHLEDTVDIPLEECRFIDEISENDFITFCEAKPDKRLVGIGKRNESFYSLKENPGVLRLYTNKEQITDLGTSAFLGLRQKGYEFTVKTAVRFIPQSDNETAGLVLFQNNENHLRAEITMEAGRLVFVVTTHIKGTDKKIAVADIMEYSITEKNPLWNICMICKEQEASIWIGTAEKSVKVAEKISLLPYTTEEAGGFVGCTVGMYASSNGSNSNNYAEFSYIMLTQMIENLNGIHETVKYKENSNVKLFINTEAEDYPIHWHTPMEIIMPLEGGYTVQIGDDLVHLNESDIIFITSGVTHRLIAPDTGKRLILQIEWSAVSKIKEFNSILTLIAPAITLTPETSGDIHSNIRKLLLDISDEYQTDSFLSEAVIYSKMLEVLVLIGRHHTASSCNFNVGRHKQQEYLERFLSICEYIDTHCTEDITLDEISKIAGFSKYHFTRLFKQFTNNTFYKYLNQKRIELALTLLADPNISVTETAMQSGFANPSTFIRVFKAEKGCTPTEFRKMFTGMSKKTIEYAKKLVSQMTIDEKISQMLYESPAIERLGIPEYNWWNEALHGVARAGVATVFPQAIGLAATFDTDLIEKIGDVVSTEGRGKFNEFSKKGDHGIYKGLTFWAPNVNIFRDPRWGRGHETYGEDPYLTGKLGCAYIRGLQGDDPDHLKSAACAKHFAVHSGPEAIRHEFDAKASKHDMYDTYLYAFKRCVKDAKVEAVMGAYNRVNGEPACGSRTLLKDILRDEFGFEGHVVSDCWAILDFHEHHHVTDTVEESAAMAVNNGCDLNCGSAFLHLKDAYDKGLVSDEAITAAVERLMEVRIRLGMMKDYPSPYEDISYEVVECKEHVELSVEAARRSLVLLKNKDNFLPLDRKNVKTIAVIGPNANSRDALIGNYYGTSSRYITPLEGLQQYLGEDTRVLYAEGCHLYKDKVQGLAEEKDRFKEALIMAEQSDVVVMCLGLDATIEGEEGDAGNEYASGDKLGLMLPGLQEELLEAVAAVGKPVILVLSAGSAIDLFWAEEHVDAIIDSWYPGARGGKAVAEAIFGEYSPNGKLPVTFYQGTENLPEFTDYSMAHRTYRYTNENVLYPFGYGLHYGETNYDGLSVDKAESDVNEPVEVFVNVTNDSRYTVNEIVQLYIRHVDAAEYEPGYQLKGIEVVKLEPHETKKVKLTLSPRDFAVIEEDGSCVAVPGIYEISAGGQQPDDRSTKLTGKRTERIDITRCGEKTGVDYMRRPIWNAIERKLDDYSLRKKFYIFYVLCVMLPLIVTDAVVLSIVENAEKESSRHEMSSIASAVGYNLNSMVNNAEEAAKSIYTSKRIDDFISKEYTSSAEYVAEYQSFFQDTLFENTLGMSNIVFFLYADNPTIVNGGKVNDMSAVRNTDSYRLLEQKESGGLFFVYEKGVAGLSDERHMIYMKKLDFYSSDIEKVLKIEFNYGSMMRTFKNMNYDNEVLICHGDDIVLSNGAYSGVNKPFKTLEAIGKISDSVYRQKLSLYGCDLDIYVFKTRSNIWSMLMHNAPIIVFLMLINVFFPLCLFSIFNHSFTSRILQLSNVFKSVDSEKLVSMTDRESKDEIGSMIKNYNRMVSRTNDLIQTVYKNKLKEQEMLVSQKNAELLALHSQINPHFLFNALESIRMHSLLKKENETADMVEKLAIMQRQYVEWGNDAVTVAKECEFVKAYLALQKYRFGERLNYNIDIEADCMECQVPKLTLVTFVENACVHGIESKAAPGWIFVRIFKKAGFMHIEVEDTGSGIDPDALEKMKSNMKNADIDMLKTGGRVGVINACLRIKMVTESKAVFDVDSEEGCGTTVMIKIPETYLMLKVLLVDDEPFIIQGLKVIIDWENEEFEIAGTASNGKEALQFLENENVDLVIADIRMPEMTGLELLETLRKDKKSDVYFVILSGYADFSYAQQALQNDCTDYILKPVDKEMLLKVLSKVLVLKNEKNQINEDNKKMKQAYLARHLISLIQGKYDEVNLNYVKENMRCEGGARYVEIQMEQLPAGDEILDSDMRSLQRKMYESCVAFLGADSAHCVFDVSVNEKVYDIGFIFSDYMAEEAAKNERKYLEDLRRYICDNTQKNIVMLVGRKVSDISKIARSYGNACMLRSFQGFRIVKSIYYYEDEVKISADGIVLCKDSLDKLLRTVEQNNHLEIRNAVAKFYDEMSSMGMNGESMNLNINYLLFQFIHLASEQDDNVNQQEILRLISESSFKTGIERGSRAHMTRFCCEYGDYLSQLRKNVSRGVIGMVEKEVRDNYATNITLKSLSEKYYVNSAYLGQLFRKKYGQSFKDYLNNYRMERAAELLLRTDKKIIQIAEEVGYHDMDYFVNRFIQVKGCTPARFRRQMQSGEMKRKRIVSMLLVATMAATLFAGCGNDSGKKGGTETGSAKEFDAFFAVPGTEINDDNEIQKIIEEKTGVRVKETWLTGQTADEAIGTMIAGGEYPDFIEGASGQMQLYDAGALVPLDDYIEKYPNIKNLFTDLEWEKLRQDDGHIYWIPQFSCIKGDEKVCAHNDEAFWIQARVLKWANYPEIKTLDQYFDLIEKYNEANPTMADGTENIPYTILCDDWRYFCLENAPQFLDGYPNDGSCMVDPDTKKVLDYNTSDTAVKYFKKLNEEYQKGIVDPESFTQTYDEYISKLSTGRVLGMIDQWWDFAYTAGDAIKQAGLDEQGCDYIPVPVTIDGRDNQWHNAGGAFNESTGLAVTTSCDDVDAAMKFVNDLLDQDIHNLRFWGVKGTDYEVDENGEFYKTADERKKASDTAYKASHSCPYSYFPQYSGTSDDGINANKPDGQAREFYDGLNSDVQEAFDAYGVKTYVEMLGTNNAPGDWYPMWSYSNNFNTSTPGGVAWTKIGEVKHEQLPQVVMAKNFDKAWNTYMDKYNACNPQDFLGELQTELDKRLEQAAKFKMSLTRENKKEKVRKPRTKITWKEVKRQKVLLFWAAIMVAYGVVFYYLPLAGWAMAFQDYKPRLGIFHSAFVGLDKFKMLFSDMTFIRVIRNTLAMGVINLVVTFVTAIAFAILLNEIASKGGKKVVQTISYLPHFLSWIIVTGILHDMLSGTGIVNEFLVNMHIIDQPINFFAHTGYFWPIVAFANVWKETGWNAIIYLAAITSIDPSLYEAASIDGAGRWAKIKYVTLPGIKPTIIILLLMNVGNVLNAGFEIQYLLGNGLIQKVSQTIDIYVLKWGISQGDYAIGTAAGIFKSVVSIILIFIANKIAKHNGEEQLFMADITAGSVKSKKKKKISIFPIVNCIIMVLFLIITLYPVLNTLAISLNDGTDALRGGIYLLPRKFTWKNYITVLQKDNLITGAYITVARTIIGTVLALVANAILAFIVSRKRFLFKRGLSLFWVITMYVNGGLIPTFLLYKGLGLTNSFWVYVIPGMVSAFNMLVIRTYMNGIPDSLEESAQLDGAGYTTIFLKIYSPLCKPVYATVALFVAVGQWNSWFDAMLYNRMSTKLTTLQYELMKLLSAVTNQGGSAETLKNAVGAVTPTSVRAAATIITMLPIICIYPFLQKYFVTGLTLGGVKEMDDNNYMNNDNQSSGTPDNTDVFGQSSGTANGSDTYSQPQDTYSQPQDTYSQPTDTYNQSVSQQESGNAYAYGQSSDQTGSTDGYVNNPGSAYGYANQGANYAQTECQFRYCGTAIPFLTVRSTAMGRIIAVANQKGGVGKTTTSINLAACLAEKKKKVLAIDLDPQGNMTSGLGVNKDEVENTVYNLMLDECSIAESIENTVMDNLYVIPSNVNLAGAEIELLGINDKEYILKSAVDYIKDDYDFIIIDCPPSLNMLTVNAMTTADTVLVPIQCEYYALEGLSQLIHTINLVQERLNPELQIEGVVFTMYDVRTNLSNQVVETVKENLDTKIYNTMIPRNIRLAEAPSYGIPINMYDSKSAGAESYRNLAKEIIARKDIMAAKKGLGKGLDSLITDKVSKPVKPKSNHAADAVMIDINKVEPNREQPRKKFDEDALIELSESIKQFGILQPLLCQERDDYYEIVAGERRWRAAKLAGIKEVPVIIKKLTNQQIMEISLIENIQREDLNPIEEALAYKRLLEEFKLKQDEVAERVSKSRTAVTNTMRLLKLDEKVQQMVIDEMLTTGHARALLGIEDKNQQYVVAQQIFDQKLSVRDTEKLVKSLQKNKKKAKSEKQVNPQMEAIYKDLEEKLKKNMGTKVLINRKNENSGKIEIEYYSHDELDRIVNMLNSVQNQMISEYLGFDSDYIILGLAGVVIILLILIIINMVQTGKLKKRYKVFMSGKTAKSLEDTIIKRLDEVDELVAANSSIKKNIEELFDNMKCSYQKVGLVKYDAFNEMGGKLSFSLAMLNGKDDGFVLNAVHSREGCYTYIKEIVGGNSIIVLADEEQEALNMAKEANMPAEKMEKVRRLMESHIYHDGKSLKEFEIIANDIVHDINDMPYDVIVDIKERNSDLYEHTVMVTLLSVLVARKLKLDEKRKYNIAVGCLLHDIGLRFIVTMDEESWIAPISMKMILSHHENIAGTGFPMKQKNKELECRIIQACDAFDSLISGMECKRICVQEAINQIKENNGKLMLHNRLNLMLDKNISILQVIMHQFLRAIGFSDITKKQLNEVINNIIDKPEKLKVTKDSEGNEFAELSCDVAPNMGITVRGIYNDDDSFDIDYYYPYFMGSEKTTEEIIDIEKHSEKESYAGVCDDPNLGVTLIFYLQNVCDYLSEKAYINREVRAKGAVLSGLSVDGCILLPMKQKKAKTLNTVDSDKKDRKQLIAEARDGDEGAMESLTMEDIDLYSSITRRIQNEDILSIVTTYFMPYGIESDQYSVLGDIIEFTEEKNIITNEKIYCIKVSCNDIIFSVCINKNDLIGEPMVGRRFKGNIWMQGSICLMEEKKELQNQDERVVEIELERLRGFVNHPFKVQADSQMIELQESIKKYGILNPLIVRPRQDGTYEIISGHRRKFAAEKIGYRKVPVIIRVLKDDEAVVSMVDSNLQREMISPSEKAFAYKMKYEAIKRKAGRRKCGQVDHNLGKKSIELIGEECGDSPKQVQRYIKITELIPEMLEKVDDGSMGFTPAVQLSFLKKKEQKEMLDAMEFAQCTPSLSQALRIKKLSSDGNLTVRDMEDILSEIKQKEIDRVVFKTEQLHRFFPVSYTAEQMRREILEMLKLNMNKYWDAMCRVIAVSNQKGGVGKTVSCVNLGIGLAQEGKKVLLIDADPQGSLTISLGYEEPDEMEYSLATLMMNIVNDEKLNIEKTILHHKEGVDLIPANIELSAIEVSLVNAMSRELILRSMVDRLREFYDYIIIDCMPSLGMMTINALACADSVLIPVQAAYLPVKGLQQLIKTIGRVKKQLNPKLKIEGILLTMVDNRTNYARDISLMVYDTYSASIKVFGTEIPMSVRASEVSVEGGSIYSYDPKGKAAFAYMALTKEVLKEAEMASRVAGKIKLQSVDELLGVPEIAGTQEIEIERIHAFPNHPFKVLDDEKMDTLVDSIRENGILNPVIVRPDQSGNYEMISGHRRLHAAKIVGLKKVPAIVKEMSDDEAIIKMVDANIQREEILPSEKAFAYKMKLDALKRTAGRPTKENACHNGTHLRSDQELALQVGDSARSIQRYIRLTELIPELLDYVDNKKIGLVMAVDLSYLDEQVQKWVYEYFKENGFLKPVQVEALKNYPNLSNVTQFSVISIMNDALPKKSKESKLSFSAKKLDKYFPPQYSTKERESIIIQLLEQWSADQVQSEMEDRIRLSYFYGKEADQFSFYKIPKLLFTEEYFKKISVEAKVLYGLMLDRMSLSMKNQWMDDEGRAYIYYSLEDIMEALGCSNKKAISIMKELDTDAGIGLIEKKRQGQGKPTMIYLKQFMVQDVQKCRNFTSEQKAAVSEVKNLHILKCKNAMSRSEEITLPEVKNIHTNKNNINNTELSNTESYLIVSGNDEIGSDVQAYAELIRDNIDLDILLERYPFDKELLNGIFDLILETVLCRNNEIVVASNKYPAELVRSKFLKLTSSHIEYAMGCMKSNTTKVHNIKKYLLATLFNAPSTISGYYQAEVNHDYPQFAVSGKMSNFENYDFILPDGVVIENEKADKEGRKKRMSAMCVKVREQTNMNRKEFAEWLGIPYRTMQDWERGVSEVPDYVLNLIAYKVKNEKEKGNIMYEDEYYYEARKKENAKLDAELAGTFATVIGGLIGAVLSCLLFLLRRFDVLSSGLASLLFYMLTYMIPYKQLSLADIFQDCQNKFNNDKPAFLSLLETHIDIDEFIPISFRNHFYASTGRSRKYPLRAFLWALIIQRIFSIPTDQLLLTFLVYSKPLRDFCGFTKVPDASKITRFKQDFLDDLQLVFDKLVDFTEPICQAVDSAKADMTIFNSSGIEAFVTENNPKYANRIIRQLKAYAKANSFDKNYDPYKAAYGSMPSHASANPEIKQLYINGHFCYVFKFGIITNGLGIIRHIAFYNKNFIASHPDITVEKKSDSPDEDKSVHDSRLLIPTLKDFFLKHPLINPKTFLGDAAFDTAALYPKLLTGNTFGDHKHFDKAYIPLNSRAGLEKQDYTINENGIPCCPHDDSLPMKYEGISKLRSGVTRYKFVCPKIKWIKNASTGRSQRHCTCDDPCTASSCGRMVYIYPEKDLRAYPGAIRGTEEWNNTYKIRTTVERDINHIKDNLCLAGRRTENEKTLHADLILAGITQLITVVLSDKINHHEFIRSLKPLIAMPYLCGLWRFANAYMLTYTREWHVAVYITVAFVIFIASMILQHAFLAGRIIFTIFVSMAVAIIGAGWKAYDTEIQRNTVMVICFAVTVILGLISWKGIKAKESMAYEYDHDCPFEAFITNLGKYNEGELVGEWVKFPTTSEELQKVFERIGIGSKDDFGNPYEEWFISDYDCYVDGLYEKLGEYENLDELNYLASKLDELDDHDYNHFQAAMQISDYTGSIKDVINLIDNLDKYEIYPGVESNADLGHYYIEELGMMEVPDYLADYIDYEAYGRDVAINEMGQFTDYGYVRDTQEYFTEYYDGDRENIPDEYRVMDFKVSGEKERKTMNYETFKQEFAEDIKEKLYERGYDDVRISFNNVEKTNQNYEAMSVVPEGSNVGVNFNIENAFANYEHTDDYAGVLASATMVIADGLDRAPAIDVSALMDYENMKEKLSVEVISADANADLLANVPHDRMEDLAVVYRFVMESSEDGRASILVTNNLMDRMGVSHEQLRADALENSPEIRPVVIMGMNEVIKEMIDPEVYEMFGIPDDAEETMYVATVPDKNSGAGVIAYQDFMDQAAERVGGDFFVLPSSINEILLVPDNGDMTADALRDMVKDVNAKEVSPEERLSDNVYHYDSKDHVFELAEKFEARQQEKKTEIDEKSEEKGSVLKDLKDKQKEAATKPPVKDAAEKAAKSKGREVLMVITVAEAHKGTNGQKGKSYSGIGGRPPISHPQNCSHECPMNRFTYALKQRNLEELRKYPKADLHNHFVLGGSRSFLYQAAGKKIEPLKNSLSSMGEMDQWSQKYIGQDFNSTEMRKLLIKATFQQAKEDGVTVLEIGEDVWGLNEFFHNDIDELVDAFTSAQKEIAPDIELRLQIGLSRHCPIDYLEECLSHFWGNKNFYSIDLYGDELAQPIENFKGIYRRARKEGLRLKAHVGEWGTAKDVRTAVEELELDEVQHGIAAADDESVIRFLADNKIRLNITPTSNILLGRVADMSVHPIGKLYRSGVDVTINSDDVLIFDSDVSKEYLRLYESQCLMAEELENIRKNGLKPIAVMFEAVMIKKIHYCFFHFGVEKSVKLVFLSEKSDLRDIKRSDMTCPKSCRIYIARAGILIQISIVTTDTISKSEIVNAQAMYSNTIGNEIMFTHEMIKSFNQLEMDVYNYIISNEEKVVYMKVRELAEAVHVSTTTILRFCKKVGCEGYSEFRLKLKQEVSSKEKKKINMDLTAVKDFFERVQTQAFAENIQEAVKLLTKASSIIFVGVGNSSFIGKYGARYFNNVGWFSFAIDDPFTPVFRGKGERIATIALSVSGETEQTLMLAEKLKRRGSSLISITNKANCSLAKMSDCNINYYVSEYKYKQDEDYDLTSQMAVVFILELIGRELKGVHNDTDDMFMVIRLFCAAGMSTSLLVKKMEEAAKEKGKDVDIVAYPFTEMERVIEGVDVALLGPQVGYQLARAKEICDPKGVPVDVIPMQDYGMCNGMNVLKFAYKLAKNKMKEKFNEKVIPVILKFINTKAIQSIKNGMVTSMSPLIIGSIFLILSNFPIKAVVDVLESTGIKPVLDQVCGATFSISALIAVIGISYSYAKLENQEPLNCGIISLATFLILMPSSITTEGGEVVSGIINKTWTAGQGMIGAIIVGLIVPPIYCWFLKKNIRIKMPAGVPEGVTNAFSALIPAFVILTGAAVIHGICSIGFDTTGIEIIYKVVQTPLQKMTDSLGGAVLMCFTGPFLWFFGVHGSTVVGGIMTGLLQANSLANQAIIDSGVELTIANGGHIVTQQFYDQFINITGAGITIGLVMYMFFFAKSKQLKALGKLGIIPALFGINEPVLFGAPVVMNPMLAIPFIGMPVIACLIQYFALYTGICPLYGATQIPWTCPPIISGFLLAGWKSALLQLVILCVSFFVYLPFIKKIDKMNLVQEKNQPVEDEDEDWMNEKFELSCFQIITYVGTARTHFINAIHCAKEGKYDEAAELIKQGDEAFSLGHNVHADLLAMDANGEISNGYMLLMHAEDQLMSAEAFRILADEFITLYKRIDEKMGFRKDFLWGGAVAAHQLEGAYDRDGKGLSIMDVVTGGDVNTRRRITGEILKGENYPNHEAIDFYDYYKEDIRLFAEMGFKCFRTSIAWTRIFPNGDEEQPNEAGLKFYDDMFDECLKYGIEPVITLSHFEMPLHLVQEYGGWRNRKLIDFFVKFAVTCFERYKDKVKYWMTFNEINNQADIGDGFMLYANSGIIIKPEENAEELMYQASHYELVASAEAIKAGHEINPKFQIGCMIAMCPIYPATCRPEDILQAEKAMQKRYYYTDVHVKGEYPVNILKYWERKDLKIDVTEEDLAVLKQGCVDYIGFSYYMSFCTKAEPDNPEYDYRGEKDRIKNQYVKASEWGWQIDPIGLRYSLNWFTDRYKVPLFIVENGFGAYDTLEEDGSIHDPYRVEYLQHHISEMKKAVEEDGVDLMGYTPWGCIDLVSAGTGEMDKRYGFIYVDKHNDGTGDLSRRKKDSFEWYKEVISTNGENINMIDLTIRRFDMMRTIFAEYNPKHNSIDVYTSVGYMAPHMKQLNWATLGCGVIANELAQALSKEGRTLYSVANRTHEKAQAFAQKYGISKVYDNIDDVFYDPDVDIIYISTPHNTHINYLRKALSNGRHVLCEKSITLNITELDEAISLAKANNVILAEAMTIYHMPVYKKLNKIISSGQLGRLNLIQVNFGSYKDYNMTNRFFSRKLAGGALLDIGVYSLSLIRWFFKETPSHVLSQVRYAPTGVDEQVGILLMNDAAEMATVTLSLHSKQPKRATLSFDKAYVEIFEYPRGMQATITYTENGHKEVIDAGDTSDALYYEVCDMEKAINSASSDEIENLIHSQYTYDVMKIMSDIRTEWGMKYPEEEMLAEDRCKKILDILDSMGSVTVQQLMDELDISESTIRRDLVAMDKKGYLTKVHGGAIANNTNIHTQDEKVINRLKQNRSEKEQIARYAASLIVDNDFVYIDAGTTTAVMIDYITAKNVVFVTNSLTNAKRISDRGYTVYILGGEFKSTTEAIVGDEAVVTLDKYNFTKGFWGTNGITVKNGFTTPEIKEAMIKKKSMENSKEKYILADDSKFSQVSSIKFADFKDAVIITNALSNDNYKKYKNIKEVMIYTVTFNPSLDYIVDVTDFKTGVVNRTTGEKIFAGGKGINVSMVLKNLGMSNTSLGFTAGFTGNEIKRLLGKKGVDTDFIEVEDGISRINVKLRSNEESEINGQGPVITEDNIKKLYEKLDCLKESDVLVLAGSIPDVMPSSMYMDIMKHLEGRGINIVVDATRNLLTNVLAYKPFLIKPNNHELGEIFGVEITDKDDVIKYAKKLQEQGARNVLVSMAGDGAVLVTEDGQEFKAQAPKGKLKNSVGAGDSMVAGFVYGYLKSNDYKQAFIYGVCTGSASAFSEELATKSEVEALIDKWESSSNMTIRDLLAAESINLNGTPAGKTEALNQCIDLMAKSGKISDVEKYRKGVFAREEEGTTGIGMGIAIPHCKSDAVTKAGLAAMVVKDGVDFESLDGTPAKIIFLIAAPNTEDNVHLQVLSKLSVMLMDEQFTNSLINAGSVDEFLNIIDSAEKAKDEKEAAKEAKAKEPAEVKKDDVFIVAVTACPTGIAHTYMAAEAIEKKAKELGYQVKVETRGSGGAKNVLTDDEIAKAAGVIVACDTNVPTDRFDGKKVIECQVSDGINKAEELIKRIASGDAPVFKASGKKEASHSSIGGKESIGHQIYKHLMNGVSHMLPFVVGGGILIAIAFLIDGFSVDLNSLPADQRANFGTITQGAALFKGIGGTAFGFMLPILAGFIAMSIADRPGLAVGFVGGSIAANGTSGFLGALVAGFVAGYIVNLLKKIFSKLPESLDGVKPVLLYPLLGIFLIGVIMQFVVEPPIGALNTAINNGLNGLNGASAVVLGVLLGGMMAIDMGGPVNKAAYVFGTASIAAGNYNIMAAVMIGGMVPPLAIALATIFFKNKFTAEERKAGPTNFIMGLSFITEGAIPFAASDPLHVLPACAVGSAVAGGLSMAFGCTLMAPHGGIFVVPTIGNPLMYLVALVIGSFIACGLLGLLKKKVSEMGKVIGIDLGTTNSCVAVLENNQPVVITNSEGQRTTPSVVAFTKNGERLVGEAAKRQAAVNVDRTFFSIKRQMGSDFRAKVDGKLYSAPEISSMILRKLKKDAEDYIGEAVTDAVITVPAYFSDAQRQATKDAGRIAGLNVLRIINEPTSAALAYGLDHGQQQKILVYDLGGGTFDVSVIEIGDNLIEVLATAGDNHLGGDDFDERITNYLVTEFYRQQNVDLRKDNTAMQRVREEAEKAKKVLSSSSSTTINLPFITTVKGQPVHMEMNLTRAEFNEITKDLVERTAIPVNQALSDAGISAAELGMVLLVGGSTRVPAVVEEVRRITGKEPSHNLNPDECVALGAAVQGGKLGGAIVAGSSAAEIILMDVTPLSLGIETVGGVSTKIIDRNTTIPTRYSQIFTTAGSFQTSVDIKVLQGERQFARDNKLIGNFRLKGIKPAPAGVPQIEVTFDIDANGIVQVSAKDLGTGKHQEITITASSNLSDSEIEQAIREAQEYEATDGQRKAYIDARSEADTLVRQVENVMADKEKRKAMDSAQKKSVKSSLSYVKKLISRTKPGNVSEEQAAEIKHAADELRNAAAGLIMNANDKTEKVLREIHIMLSKAEPYKPEPSRVIINKQQMIDLLAELNKCIYAMQDEYELTEQSRNHAEREFRKKGDQIVWDASRKAEDVYAASVIYTDEALSRVRDIINDTNESLEKLCKNMKDKIAEQEKIVKTNQYELKGQLQDLSDTEKYLKIIDDRNKEIERQKNEGKPVEERTIDKEEKSIYANRQTEIKVNMDYIRKLGLAEGEDLGDGVVGEVKLADDTPDAGLNHSNDKDEAKDAGSKSSVDGDYKAISRKAGNPPVINTMEGKELTAGIHRMWQSITGNKGKMTILVCDDDKEIVEAIEIYLMQEGYNVEKAYDGIQAVEIMKNKKIDLMIIDVMMPKLDGIRATLQIRKESRVPIIILSAKTEDADKILGLNVGADDYVTKPFNPLELVARVKSQLRRYTTLSSNDAAGDKVYEAGGLLVNDDLKKVTVDGEEVKLTPIEYNILLLLLKNKGKVYSINEIYESIWNEEAIGADNTVAVHIRHIREKIEINPKEPRYLKVVWGVGYKIEDNKMKQYTIGKKAAVIVLHQLCMILMVTGVFATGYAFRHDAHENIDIYTLISLAGLVGSFVSLAYMANVAGRKSEDDYTIYYLPIDKVYSDVMLVIFTLLMVFMGKVISGVKNQHFDYASLIMTAGTFTFLFDLAFIILYQSIVRKIKGNILYTHSLMYKGYELLKRVIEKKDIHTQKNKEIMRIQEALEAISEGALDTTLNVNEFHGQQKKVAEAVNHIRQGLMSSVNESLKNEKLKADLITNVSHDIKTPLTSIVNYVDLLKRENLENENAKYYIHVLEEKSQRLKQLTEDLVETSKITSGNVKLNMQKLDLVELLYQTGGEFNERFESRNLTIVTKIPSEQIFIYADGRQLYRSIENLYTNAAKYALENTRVYVELEKADTKAVFTIKNVSKNELDIVSNGNVDLTERFVRGERSRTTEGSGLGLSIAKNLTHLMGGKFEIKVDGDLFIATITYNIIMKLYENGAYLLNGKEVIIDGPEAQAAVKSKTGMDIDKQTAKQETIAYGILKEHNTSGNMDKLQIKFDKLTSHDITFVGIIQTARASGLEKFPIPYVLTNCHNSLCAVGGTINEDDHMFGLTCAKKYGGIYVPPHQAVIHQFAREMLAGGGKMILGSDSHTRYGALGTMAVGEGGPELVKQLLEQTYDIDMPEVVGIYLTGEPIKGVGPQDVALAIIGEVFGNGFVKNKVMEFVGPGVSNLSVDFRIGVDVMTTETTCLSSIWRTDDQVKEFFEIHGRAEDHKELNPGEVAYYDRFIEIDLSQIRPMIAMPFHPSNTYTIDELNANLMDILDDCEKRAEVSFDGKVKLDLKSKVRDGKLYVDQGIIAGCAGGGFENICDAADILNGHSIGADEFTLSVYPASTPIYMELVKNGAVAKLLETGAIVKTAFCGPCFGAGDTPANNAFSIRHSTRNFPNREGSKVQNGQISSVALMDARSIAATAANKGFLTSAADIDVNFTKPKYFFDKTIYENRVFDSHGVADPSVEIQFGPNIKDWPAMSELPENMLLKVVSEIHDPVTTTDELIPSGETSSYRSNPLGLAEFALSRKDPEYVGRAKEIQKAQKAIESGECAGKAVPEVAEIMGVVKKKFPEASHENMGFGSTIFAVKPGDGSAREQAASCQKVLGGWANIANEYATKRYRSNLINWGMLPFIIDEGELPFHNLDYIFLPGIKKEIEDAKTEFEAYVVKDGELKPFTLKMGELTDDEREIILKGCLINYNRKMEETRKAGKKSNIEINADKGAKQNSHPGREEWPHLIRIGVMVFVTFAVSILFFFALYRFEGFAGIWSKLLAAAMPIIMGLVLAYLMNPVMLCLERCFKKLLSKKMKSESKLRKVSRALAITGSVIILVAIISLLIAAIVPSVIASISGLIKTLPNDVAAFINMIKNGNFGGSKIAELASTCLQNTTDYIENYATEKIIPEAQKYVAQITTGVISVVRGLLNFIIGIIVMVYVMSIQETLAGQSKKIIYAVCKPKTGNIIIETIRKTNEIFGGFISGKIIDSLIIGVIAYFGCLILRIPSSVLVAVIIGVTNVIPVFGPFIGAIPSLLIVVIQSPWHALYLLIFIVVLQQVDGNIIGPKILGSSTGLSTFWVMFAILIGGGMFGFLGMLLGVPTFAVIYYIVRRVVNYALRKKKLPEDTMDYTKTTGVDTKNNKLKYEMDKYEYNLKLDQIKALSAEEGYMSAAEIADSINWNKIKNVNTLVKIGEIYEKAERYQDARDILLMAYDRSPIGRMIIYRLAEVAIKMGDYDAATEYYDEFVEIAPHDDMKYVLRYAIKKGQGASFDELITILEEYKDEEYTEEWAYELAYLYHKAGKADKCIDACDELILWFGDGPYVERALELKMLYQPLTKAQEEKYRRFKAEKEKPAEIKDDAEVTEIGAMEMVKGGEIVHDDVTIPQITVNQEKFNTVNLQQEIAKGMQQIIEAKGKNEVADTMDTIKKIVEDIPYLKLEKEQEEYVQQPEETEHIATDEEIDGSLKLNFKELLGEDADGQMSMVMSEKTQLEHQITGQMSIHDVLEEWEKTRHAAEIALKEAEQQKLESAKARALQEAGDIMERLNDVIPKLDAGVTPKELLEEEYLKVPVDIIEQKAAVKEPEEGQKPDMQELYADEIVDEAQEPQEAPEEAIDEIQESQEAPEEAIDEVQESQEVPEEAIDEVQESQEVPEEAAYEAKEPVGEPDDIIVAEESEKDEIFTQPTTMMPEITDDMLNVDDETSQEKENVSEKRDFDHVTSFIEQEIAKMTAKNPGLEKKLDMAKTRKMPDISLPEDLDSEEDDSKLKETKHIKELTSEQKAIFSYFIPVKGMEDQICKAYNAVLDHFNRKENASTGNLIIQGEQGCGKTMLATSFIKVLQKDGEQLTGKMGKIDAAALNKKDVQQVVRKITGGCLIIERAGDIDRSIAAQLSFLMEHDITGTLYILEDTSKGIKKALSMDEGFASKFTEKISVPIFTNDELVLFAKSYSAELGYKIDEMAILALHNRISNIERIDQATTLTEVKDIIDEAIDREAHSGLKKAISILTARRYTDDDRIVLKEDHFREKMCNFTAMDCYLFGQATHYDIYKKMGAHLAERKGKKGVCFDVWAPHAREVYVFGEFNDWNETSHEMKRVEPETMGVYELFVPGAQKGQMYKFIIVTEQGDKLYKADPYANYAELRPGTASIITDIEHFTWTDKEWMDKRAAKSDADVYSSPMAIYECHPGSWMRHPGRDDEGFYTYRELAKSLISYVKTMGYTHIELMGISEYPFDGSWGYQVTGYYAPTSRYGEPEDFAYFVDQCHKNNIGVILDWVPAHFPKDAHGLANFDGTATYEYADPRKGEHPDWGTKIFDYGKNEVKNFLIGSALMWIENYHVDGLRVDAVASMLYLDYGKNDGQWVPNKFGGNKNLEAVEFFKHINTLILGRNHGTVMIAEESTAWPKVTGKVEEDGLNFSYKWNMGWMHDFLDYMKLDPYFRKNNHNKMTFAMSYNESEKYILVLSHDEVVHLKCSMLNKMPGLEGDKFKNLMAGYAFMMGHCGKKLLFMGQEFAQKQEWSEERELDWYLLENPEHKKIQNWVKELLHLYRRNRCLYELDSSWEGFEWINANDADRSIFSFIRKSKDGKNNMLFVINFTPVERPDYRVGVPKHKTYQLVLDSEDPKFTGKTVQAPVKKAAKGRGKAAKQSYKKLDYKAVKSECDGRPFSFAYPLAPYGVAVFKYMQIENLINKSTDTKNTDTKTINDMTAGMRVSDYIKTDSSDNMSKKAAVVGSSNSVDMSDTIYARPQAKNEAGNNDGTDMAENLLNDMNQTSENRRNDMIVTASTTTSDDYKAAKDDGYDVIVTETDKIKAVLAKAGVDISIYGDDLSMEQLTDITGSQTEAAMLVNQMKAYDIPATDDNIKAGTDAIDRAKSLTNISNETKAYLVRNNMNPTVSNVYKATYSSSQVQDYRQKTKMTEISDELFEELKPQLKQILEEAHIDSSDENLNQCRWLIDEDIAVTPDNVLLANQVDCINAAEENVSSDFYARAVTEALAMGKKATDATMSQDGLTFDMAKKACDVLGEATADDIVTLESDNIPVTIENLSKLIAARGKDSAASQASANKAADNQITDSREARLVTAQRKLEEARLSMTAEANLSLIKKGVSIDTEPIERVVELLKQQENKYYGALFGESSVEASDDRVRMYNNVCDIFNQMKQQPAYVLTLESADDTVYELYTAGKAMKQSLEAAASGYETLMTSPRADMGDSMSKAFQNVDDILKELQIDTSESNRRAVRILAYNSTDITEDNIKQIKSVDEQVQRAFSDMTPAVTIEMIKRGISPLDMSMSDISDTARRIKSENPDEKDEKFSEFLWKLEKKNEISEEERDSYIGIYRLISQVEQSDGAVIGSLVNQGADITMKNLLTAVRVRGKSAMDYKVDDTFAGVDSVSSGIKIDSQIESAYHTNCLRDVLDTLSPEKMEFMQYDSWLDMTPEQLRQAVYEADEDNALSEQYATEQLRQFNQAVSVPENVYAFLEKYDVKTTAVNLMAASRLMKNPSEAVRNLWERGDSATARALLDETLRRFSESVKNPKELAQAQETLADTAEHVMDSMIIEDRHTGSIDLRQMKLLCSQLRIASNMSRQENYIVPIETADGVTGMKLSIVRGEDKKGMVDIFLEDKKCGRVAAYFEAKENSVSAMIVTDDEQTKKLFEDNITMFEAGISDGEQRVRIDVALEHDISAKESKMSDMKSNTESDNETKKQLDGSESVQTTRLYHIAEQFIVNVQRVIAQDSLMRKLQPAHGGSDPGKISTSGVMEKDVNLSIAMALKQLFENRGFTVVMTRTTDCDLAPDNSKHPKTDDLTKRTALMSKSNVAVSISIHQNSFEDNSSCGPQVFYYEASDAGKELASSVLGALNTSLCVAKPRSIKPNKEYFILKKSTSPTVIVECGFLSNPAETLLLTDKNYQDDLAHAIYIGVTDYLAQSPSGHLQMIYQKGSSLFNVAIYIRLSREDGDKEESDSVGNQRKLLTEYVNKHDDFILYDVYIDDGFTGTNFNRPDFHRMIADIEDNKVNCVVVKDLSRFGRDYIDTGRYLERIFPELNVRFISVTDNIDSMKQAYDMLLPIKNIFNEQYARDISNKVQATVKSKQKAGEFIGAFTSYGYKKSPANKNKLVIDEYASEVVKRVFTMYAQGIGKQSIAKILNAEGILCPSEYKKLNGENYKNCNRLEKTSYWTYSTVNIMLKNEMYIGNMIQGKKHQRMRSKQRPVEKENWIRVENTHEPIIDRQLWDKVQKLLTKKHRDIDLETNKNIFAGFIKCGDCGRAMMKNFWRRADGSRSYSFYCGTYKRSGKDYCTPHTLPFQVLNDIVLGDLKQIIRNVENLQELVKSQSFTATKIRKSTDIELTKLKTELERVKKLKKSIYEDYKDELISKEEFLSYREDYQQKETLYSKQIETLEEKKKESVTEDVFETPWLRRLLELKDIEELDRDIIVEMIDQITVYENRKLKISYNFGNELEHLFSSVYCEDLEKKAIMIKGADTLTKKKPAQYIVEREFLCKFSVEELLIRIVKSHIKNAYQEGKTFENHGKKPYFIVMNIFQLKIIAMIAMFLDHIAYFFPDLPMSLPLHWIGRIAAPIFIFGVVNGVKYTSSKRMYILRLYLASIVMAVIQMSTQIELNFFRTLFIVACICEILEIRKNQKAVSWIKVLSLYIAYQVIVCIVCGYLSSISNMYTETICFYLIPALLGSVFTTEGGLIFVVLGIIMYLAYDNKKRLILSYMIFVVVYMFFMSTNIVPIILWKIKELIPIIGTGLSHGMEYLLSIIGGISPMDVGGNIFTIQYQWIMVLALPLILSYNHQRGKKCKYLFYIFYPIHIILLWLLSNFVFVMRKLFKSFKTEINPTVEQKVKINKTIGTCRYVYNFYLSYNKTLHDKDEKFMTGKSFSVWLNNEYIPNNPDKIWIKEAYSKAVKMSKISVVYWSQSGNTAAMAEAVAKGVTDAGKEAEIVFVSSASIDELKSETAFALGCPAMGAEVLEEGEMEPFVTELEGCVAGKTIGLFGSYGWGDGEWMRDWVERMTAAGATVVGGEGVICQDAPDDDAKTACEELGKKLAAVMCQEVFQIAMSMDLKSVEMQLALQCAPLITGARISNMLMIDSADESAMRVILRASGISHFRLAARNEKTAFLLFRRSLLEAYLNNLEALDILKKAGYEDFSFGKILLRFKKHYEAYLNDEHKQFPHEMGLLLGYPIEDVRGFIEHNGCGCLYSGYWKVYRNVPLKKKMFEDFEKAKESVIQLLAEDIDMRLILEIYKEEPQHIAVMNTMKLPVGIDDFRKLRESDFYYVDKTRLIEQILQSWSEVTFFTRPRRFGKTLNMSMLKSFFEIGTDKSLFDGLYISGNKELCEEYMGKYPVVFLSLKSVEGTSFDEARYRIIELISREAERFKFLKDSEGLSENDKNRYNAIISVNDGKYAMDEKLLISSLQVLSQLLFTHFGRKAIIIVDEYDVPLDKAFQNGYYNEMVSLIRGIFGMALKTNEFLQFAVLTGCLRISKESIFTGLNNFRVMSITDARFDEQFGFTDNEVKKLLEDYNMSMHYNDIKEWYDGYHFGKADVYCPWDVINHVDRLCDDSDIRPQTYWINSSGNSLVRRLISKADSSTKDEIERLIAGETIVKSIRLDLTYDEIESTIDNMWSVLFTTGYLTKAGDVKLPDSESYAYKLVIPNKEVREVFILQIQEWFKSVVANDNDTMKLLSKAIIDKDETKIAKQLNIVMGRMISILDTKAPDDMKENFYHGLLLGLLRGSNPDWLIKSNRESGDGFSDIMIMPENPDAGIVIEVKYARNIKELDTACEIAMAQIKEKRYDEALRNEGRCDIIAYGIAFSRKRCKALGERLMERTHLPLKLHLPASVTIGGCMSKEAIEQKEVIVGKLKDSGCRITKQRLILLDVILEGECGSCKEIYYRASKIDHSIGTATVYRMINTLEEIGAIDRKNMYRVQVSMLADIIVIAILVVIVALVIRTIIKSKKAGKSLQCGMDCSHCKGCHMRINLEFNTADLIAVIVLLCLLGLAVKIIIGFFKEKKMAVKIALAGNPNCGKTTLFNALTGANQYVGNWPGVTVEKKEGKLIGHKDVDLVDLPGIYSLSPYTLEEVVARNYLIGEQPDAIINIVDGTNIERNLYLTTQIIELGIPVLMAVNMMDIVRKNGDKINIKALGEKLGCEVVEISALKKTGIKETAEKAIQIAKSGKSVQRVHHFADDVESTIAGIEDKLGLAVAENQKRFFAIKLLERDSKISEVLKSAPNVDAEIKALEDKYDDDTESIITNERYQYISSIIGSCVKKARAGKETVSDKIDKIVTNRFLALPIFALIMWAVYYVAVSSLGGIVTDWTNDTLFGAWIQPAVQTFMENVGCSDWLVSLVVDGIIGGLGAPIGFAPQMAIVFLFLSILEDCGYMARVAFIMDRIFRRFGLSGKSFIPFLIGSGCGVPGIMATRTIENEKDRRMTMMTVTNIPCGAKLPVIALIAGFIMGDGCWWMAPLMYFAGIGLTIIYCIILKKTRAFAGEPAPFVMELPQYHVPSVKGVLLHVWERVWAFLKKAGTILFLCCAVMWFLSSFGIQDGAFGLVDTENSLLAVIGSAIAVIFAPLGFDTWQAVASSLSGFVAKEGIVSTMGVLSGLGEVEEYAVSMHDQFAAFFPTTMVAVSFLLFNLFDSPCLAAISTTAKELNNRKFFWFTIIFQNVSAYCVTLMFYQIVGLCIGEVAFNFWTVVAFVLLAGVLYLLFRKDPNKATVKSSSFAASNVMKTLKQAKVGETVKVVKLTGQGAVKRRIMDMGITKGVEIFIRKVAPLGDPVEVTVRGYELSLRKDDASMIEVEMMPLSMSGAGEAQIIKKIGGKEEVRSFLEKLGFVVGGEVTVISEIAGNMIVNVKGARVAIGKDMANKIMVMDNNKEMIEGLVSQILDDYHDDKIINQQALFSQPDKEAVCDLLSKLIKIMYPGYFKGTSFRYYNLDSQIAVLLEDIMYNLRKQVVLALPQNPKYRSLSHHELVNMSEKISNDFFKRIPKIRALVETDVAAFFDGDPAAYNYNEIILCYPGLLAITTNRIAHELHLLGVPLIPRMMTEHAHSKTGIDIHPGATIGKNFFIDHGTGIVVGETTIIGDNVKVYQGVTIGALSTRGGQKLKGVKRHPTIEDNVIIYAGASILGGETVIGRGAVIGSNAFITSSIEPGARVSIKNQELSIRTGERKELVASEMETDPSWFYVIMTKQSRPYLDSKTPEIKTEKCKAVGGDCKESNIEGKSARKYSRRWDIIVTAFDFVTNFSESSISAYAGQAAFFLMLSFFPFLLFFFSLLSWTPLTEADFLMWASSFIPESFGDIMKDLASEVYASGTGRLSITMITAVYLSSKAFISFQLGLDDMYHVKENRNFILRRIYSVLYSIVFALALIFLLGVMVFGNMLRKMYFSNVHHIIGSIIGSVVDYRLVICLPVLILFFWVIYVFLPNKKRRAKYQLPGAVFAAVAWMIFSGIFSVYVDKYNNYSSFYGTMTTIALIMVWLYGCMYVLFIGGIINRTWEERMEAKKYYKMLQTGIKGKKEITVTLDKTAKAMGSGTMDVFATPAMIALMENTAFESVASELEEGSGTVGTALDIKHVSATPVGMKVTCESELVKVDGRALTFSVKAFDEAGLIGEGTHERFIVFEEKFQKKADDKAKMKIKYELPQGSITGQSGTTKSMPHNYPYKILWLTSYFLMTEKHGNLSIDSDNLFPIIKKWLYSDHDIFYRELISNGCDAITKLKKLDMMGEYSLPADYKGKIQVLVNPDEKTIKIIDNGLGMTADEVEEYISRIAFSGATDFIEKYKDKSNDDQIIGHFGLGFYSAFMVADEVTIDTLSYKEGSTPVHWSCDGGTEYNMEDGDMDDVGTEITLYLNDDCLEFANEYRAREVIEKYCSFMPTEIYLAKENAPEEYETIDKADKRDTDTVIEEIHEDAKYEEKENDKGEKEQVEVSPAKDQLKIVKRPVPLNDTTPLWTKSPNECTDEEYKEFYRKVFLDYKEPLFWIHLNMDYPFNLKGILYFPKINTEYDSIEGTIKLYNNQVFIADNIKEVIPEFLMLLKGVIDCPDLPLNVSRSALQNDGFVKKISEYITKKVADKLIGMCKTDKEAYEKYWDDISPFIKFGCLKDEKFCDKINDYILFKDINDKYQTLPELLAPVAEDEKTDAESADASDDTKKADNTDENKEPEKNTVYYVTDVVQQGQYIKLFKEQGMNAVILDHNIDTSFITQLEQRNDHYKFMRIDADLTESLKDESGADLTEATTTLSEVFKKALNNDKLTVKVENLKNADVASVLTLSEQGRRMQDMMKMYAAGGMGGMDPSMFAADQTLTLNANNELVKYILDNKDSEHVPMFAEQLYDLAMLSNQPLSVDQMTKFVKRSNDIMLLLTKMDWEFDILYAIQSIRTPFLDKLMAFLSTLGNAGALWIVIGVVLCISKKYRRGGMQMLSAELLSFIVGNLIIKNMVDRLRPCQIDETVSLIVKIPFDSSFPSGHTLNGITAAVTLMLIDKRMGIPAIVLAVLIAFSRMYNFMHFPTDVLAGALLGVVSAVFMNFLFKRAGKSEMTKMKYFKKTMCMLLASATLLTGCSIGGKEIVLDINTTNSHTVFSVDNMKCDKTEALIYLANYKNLYGTMYEVNLLETDDASNVEKYIRDVTVDELTRIYCMVSIAKQKKITLTDKEKSSVSKAAKEYYDSLNEAEKKFTKADLSDIESAYEHYAIAQKLYNSLSKGVDTEVSDEDARVIHIQKIFVKSKESADAVSQKLLSKEDFAAVASGSSEDSQTELYAAKGTLPQEVEAVAFELGDGETSDMISTDDGYYFIKCISKLDREKTEQNKVTILQKRQQEQFNDDYEHFVKKAGFSLNNDLWDSISIKDEKDVKTSSFFTVYNKYFQADNMYEYDEEVLDTFLKKQTQLFSEEVADTPEAAEEFLEDCMAVVCKNIKEVRDYFDEAGSDISGMSDDELMDQSEVFAIADGRFLVVEGMDVKWTSEQKKVIDLRDRDILVSAAAGSGKTAVLVERIVNRICVDNPPVDIDRMLVVTFTKAAAAEMRERVSRAIDSLKEQKPDDENLQRQSTLVHNALITTIDSFCLFVVQNNFAQLNLDPDFRIGDKAELKLMLKDALAQVFEDNYAREDNEAFINLIDTYSKGRNDSDVRQMVEDIYYKAGSSSWPRKWMNSLLRLYDIKSAKQLEDSEIIKEIVDYSRVLLEEAVQDLTMAKDLASATPGLEKYALTLSEDIALFDGMADVTGYVGMQEFLNKISFGRIAVIRKFDGDEKKKERVKSMRDAGKKKVDGIKQKYFGMSIELMYEQLERQRPFVKELIRLSLEFYDAMEAVKTRKRVFDFSDIEHFALRILVDEQTLKPTETAREFSKHFEEIMIDEYQDSNQVQEDILTAISREHQGVGNMFMVGDVKQSIYRFRMARPELFMEKYNTYTSDDSAHQRIDLHKNFRSRNEVLDFTNDIFYKIMAADLGNVQYDDDAALYPGASYPKETMRPELLLVDYKDDELSEIIEDEDGDKVQIEALLIANRIRSLMENGMVTDKKTGQLRAVQYRDIVILSRSVATWGNTVTAVLKDCDIPAHVESNTGYFSSYEIQVILSMLRILDNPLQDIPMAAVLASPIVGMDDEELAQIRSAFKGVSFAQAALSAMAGENGYEDEKLKAFALVFERLRGAVADTPIHELLYMMLDETGFYRYASAMPAGKRRRQNIDMLIEMAAAYEKTSYKGLFHFVRYIDIQQKYEIDYGEADTAGENDDVVRIMTIHKSKGLEFPVVFVSGLGKGFNTQDTKSDLVIHEKLGLGLVEKTKSPRTKRPSLIRNEIVSRIKRENLGEELRVLYVALTRAKEKIILTGGLSNAQKSFEKYRGNVNANQPISFGQREGAGCYLDWIIPAMLSYPDKYTVSTVDATEFAARTAMDMAANDISKAQLIGHISAADETKAKELAEEFDFEYVYASDITKKSKYSVSELKHDSMVEKYDSTEREAERPKFLLEEKETYVPDFARDDEAGDASNESKEPKNAAGVNQGALRGTAVHRVMECLDFKRLCDIDTKDHVAVSAFVKKSMDEMLKKGLITDDMYRLTRPKLIEQFISSDVAARMAQADKRGDLYKEKPFVMDYEGVLVQGIIDVFWLEDDKIVLLDYKTDSVNAAKELIDRYSTQLKLYADALGRIFSTDGKSIQADERLIYSFRLQQTIVTCREYKKMSLQFITGNSGNGKTKYLFNRIVKEAKANPRDNYLVIVPEQFTMQTQRQLVDLSENKAIMNIDVLSFKRLAYRVFDELGITNLTVLEETGKNLVLRKLAAQEADKLGVIGRNLNRIGYISEVKSLLSELVQYNISPEELGRYIASGMLSDTLSDKLKDVLVLYEAFEKFMQDKYITAEEILNVLSNVAEESAILRNSVIAFDEFTGFTPIQNQLIKKLFVISKKIYVTLTIDCREDIFKSRGMQELFDMPKRTVKSLTEMAAFYGIEVEEPIILDKNYRLAENEELSFMEQQLFRKRRCSFKKVPKHIHIDCLRDPKQELTKIARRINELVRNENLRYRDIAIVTGEVNIYAGYVREIFDKYNIPYFIDATQEILFHPFIEFIRSIPDIAAQNFSADAVFRFLRCGFSELLDSEIDVLENYVLACGVRGKSAWDKKWVRLPKHKAGYDLELLNQSREYIMELLKPVYQVFSNKKSTVKDYVLAIYKLIVLLDIPDKLAKKEQALLDAGDQTASKEYGQIYKIVMQLFEKYVAVLGDECMDAEEFTQILDAGLDAADVAVIPPGYDTVTIGDIERTRLTNIKVMFFAGVNDGIVPKAAGRGGIISQYEREALKELDIELAPGAREQAFIQRFYLYLNMTKPSMELYISYTRLDSEKKAAQPSYLIGILKGMFPELVVTETEDVEQLLDISSRQSALDYLLSNEVDDRWCEIAAAVMLYDASVSDAGDGNEVDDKEFTQKNSVERLINARFEHYSKDPISRNVARSIYGRHMEGSITRFEQFARCAYAHFLNYGLRLTEREESGFTSLDMGNIYHEALERYSKKLDRESTDWFSVTDAKRDELAMEAINEVIDEYAGFGIFDTAESQHSISHMKAVFKQTVWALTTQIRRGSFVPERFEFSFYESLDMANDVTVDIKGRVDRTDTYTDEGRLFVKVLDYKSGNTVFDLVKLYYGTQLQLAVYMDAVMEQKKEALKQVSVEPGGMLYYHIDDPVIDLKDVTPGTELSEEEINQMILKKLKPDGLINSDEKAYRGMDRDFEKSSDVIPVTLKKDQTPAAGSKVANAEEFDVITRFAREKLREIGREIYDGNVDVNPIKNKKIDSCAYCTFQAICRYDSRIPGFSERSFNGDNKEDVLDKMRTQIAAAEHKACYGDNNIKPMQEYELKYGCNPNQKPARIFMKEGELPIKVLNGRAGYINFLDAFNGWQLVRELKKATGLPAATSFKHVSPAGAAVGQPLSDVEKKIYWVDDMDIEFTPLANAYIRARGADRMSSFGDFISLSDVCDKSTALVIKREVSDGVIAPGYTDEALEILKAKKKGNYCVIEIDPSYEPAPIERKDVFGITFEQGRNELHIDDDFFSNIVTENKELTEQAKIDLAISMITLKYTQSNSVCYVKGGQAIGIGAGQQSRIHCTRLAGSKADNWWLRQSPQVLGLQFVDGIRRADRDNTIDLYIGEDYMDVLAEGEWQKFFKVKPDVFTAEEKRAWLDKNTDVALGSDAFFPFGDNIERAHKSGVKYVAQPGGSVRDDHVIDTCNKYGMVMSFTGIRLFHHMIADRLGAHLYKFPAELYIIMCVQTVFFIPAGPSNLGMQTTLSENMEDDMERVSLAKELSSTTYPGRGIVIGRTKDGKKAVTAYFIMGRSENSRNRVFVEDGEGIRTQAFDPSKLEDPSLIIYAPVRVLGNKTIVTNGDQTDTIYELMDKQQTFEQALRTREFEPDAPNYTPRISGIMHIDNGEFNYAMSILKSNNGNPDACNRYTFAYSAPVAGEGHFIHTYMGDGNPLPSFEGEPTWVDIDGDIDEFTDMVWENLNEDNKVSLFVRYIDIATGEYESRIVNKNKMINIGEVIETNDMVEKENLDVRTITLGISLLDCIDSDLAKVNENIYNKITTLAKNLVSTGKEIENNYCIPIVNKRISVTPIALVGGAACKSSEDFVTIAKTLDRAAKEVGVNFIGGYSALVSKGMTKADELLIKSIPQAMLETDLVCSSVNVGSTKTGINMDAVKLIGEMIKETAEVTKHLPVSGCAKFVVFCNAPDDNPFMAGAFHGVTEADAIINVGVSGPGVVKTALEKVRGENFEVLCETIKKTAFKVTRVGQLVAKEASKKLGVPFGIIDLSLAPTPAIGDSVADILCEIGLERAGAPGTTAALALLNDQVKKGGIMASSYVGGLSGAFIPVSEDQGMIDAVNDGALTLEKLEAMTCVCSVGLDMIAIPGDTKATTISGIIADEMAIGMINQKTTACRLLPAIGKDVGDVVEIGGLLGSAPVMPVNRFSCDAFVNRGGRIPAPIHSFKNMDNTKNKVIITVVGKDTVGIIAKVCTYLSEGSVNVLDISQTIVSGYFNMMMIVDMANATASFAEISDQLDALGEEIGVTIKCQKEEIFEMMHRIMLELCSIASGSSGNCICVGTDDCHVLIDAGISGKKIENGLNEFDMTATDMQGILVTHEHIDHIAGLGVMARRYHIPIYATKATIGAIKCTKSVGNIDDELFHPIEAGVDFTIGDIEFEPLHISHDAADPVAYRFKNENHAMAVVTDLGTYDDTLVSKLQNLDGLLLEANHDINMLQTGAYPYPLKRRIMGNSGHLSNERSGQLLCELLHDKFGSVILGHLSKENNYEKLAYEAVRLEVTMGDNPYKASDFPMYVAKRDRASDRIAVEMNNVFGLDIGTRNVVGTVGYQTDDKEFVVTAQYVREHETRAMLDGQIHDIGRVAKTIKEVKDELEKQTGQPLEEVCIAAAGRVLKTVTTHVEYEYAQESVVTGEDVHTLNLLGIEKAQEELKEVNDTSYKFYCVGYSTVKFFLNNEVFISLEGHKANKIGEDIIVTFLPEDVVDGLYAAVGQAGLSVANMTLEPIAAINVAIPENYRMLNIALVDVGAGTSDISITRDGSIIAYGMIPHAGDEMTEVIVQHFLVDFNMAESIKLQSTTSDTVTYKDIMSIEHTIPAQDVWDVAAPVVDNIAQEVSAKIRELNGDKTVSASFVVGGGGKIHGFTEKLAEDLDLPEERVALRGEEVLGDVTFEQEDIKKDPLLVTPIGICLNYYDQRNNFIMVRFNGERIKLYDNNRLTIVDAALQAGFPNDELFPKRGTPINFTVNGVARLVRGEAGEGAVVTMNGKPASINTPLEPNSEIVIEPSTAGEAAEYKISQLDEYNHSVITFVINGRKVSCPRFVQVNGRLEPEDYSIRENDVIETRNYYTVRQIAQFMDLVIDTDQMIFVNNEEADLDTLVYENFSVEWKTDEYGVARIDNNNYNDTQESDSDDASVLAEQGANSTESDNTATRTSEQMMNQVLDELHDEFAKEAEASAVPENELPENELPKNDIQEEIHEEDSSENTVTVIVNGEPVELSGKDTYIFVDIFTHISFDLQAGKGRAIATVINGRDAQFSEELHEGDKIELYWKENMTGMMRIDDRKGNSMIFIGITGGVGAGKSAVLSYLKELDGVKVMLSDEIAHELMEPGSDCYNRLKELFAGEPIWLEDGHFDRPALAGVIFSDDKKRELLNEVVHPAVKEYVLNAVKEAKKDGLFMLVLEAALLIEEGYGEICDELWYIYASEEVRRKRLKSSRGYSDEKIDSIFASQLKEAEYRRHCKEVIDNDGDIENTIASINKALSKYKEMSEKLVLIDGHSILNRAYHGLPDLTNSEGLHTNAVYGFLNIMFKILDEEKPDYLTVAFDVHAPTFRHRMFDAYKGTRKPMDEELRQQVPMIKEMLTAMGIKIVEKEGYEADDILGTLSVRAEKAGMDVAIISGDRDLLQLATDHVMVRIPKTKKTGTEIENYNTADVIEKYGVTPKEFIDVKALQGDTSDNIPGVPGIGEKTAGALIAKYHCIEAVHEDAENVKPPRASKNIVEYWEQALMSKELATIILDAPVDYEFSDAKLSGGVESLYTEEAFLLCKRYEFKNMLSRFNVEAPKNNAEEHFVVVRDLKTAESVFEKAKGREVAFAVVPGESFGNCESDGQLSLFSEPVSNDYLAVSICFSEEDIYFICTGDEISSSFLDEKLNTLEVKSWISPDLKTNLHRFKSKEIKADDRGRYFDMMVAAYLINPLVGEYPYDAVAKDYLGLMLSSKKDYLGKLDFTRMMKEDEKKAVDCACYEVYTAWKSKPVLLQKLKEMDMLTLYKDIELPLVFVLYDMENEGIRADGIKLKEYGDKLAVSITELEKKIYEAAGEEFNINSPKQLGVILFEKLGLPNEKKTKTGYSTAADVLEKLAPEYPIVADILEYRQLTKLKSTYADGLSGYIASDGKIHTTLNQTITATGRLSSTEPNLQNIPIRIELGKLIRKVFLPEDGDLFVDSDYSQIELRVLAALSGDERMIEAFKNGQDIHRSTASLVFDTPFDEVTDLQRRNAKAVNFGIVYGISAFGLSNDLGISRKEAQGYIDSYFVKYPKIKEFLDQTVLDAKKNGYTKTMFGRIRPIPELNSSNFMQRQFGERVAMNSPIQGTAADIIKIAMIRVHDRLLDEGLKSRLILQVHDELLIETKEAEKDKVIKLLEKEMRGAVDMKVSMEVGTECGYDWYDAHMIQDRLKALRSEMAKRGISLYVVPTADFHESEYVGEHFKARKYITGFTGSAGTAVITMDEAGLWTDGRYFVQAAAQLKDTTVKLFKIGEEGVPTVDEYIKDTLSDGGVIGFDGRVVNAAWGKRLSEIAKEKHGSMYVNEDLIDLIWTDRPPMSKAPVMIFDNKYTGEDISSKLKRVREQMAQKGATLHLMSSLYDIAWLLNVRGGDISYVPVVLSYLALSQDSCIWFLQEEVVTETLKAYLDKNGIQTRPYDDFYEYVKHIDEKETVLLNTSIVNYRICDSLPDGVKVIDAEDPTVVMKAVKNEVQLENLRKAHLKDAVAMCKFMYWLKTNIGKISMTEISASDYLASLRAEQEGFLDLSFATICGYADHGAIVHYSATEESDRQLKPESLLLVDSGGHYLEGTTDITRTFALGPVTDEMKDMFTRVCRSNMNLANAKFKEGCSGLNFDILAREPLWEIGMDYNHGTGHGVGYVLNVHEGPNSFHWKQYPGRTAERVIEEGMVTTDEPGIYLEGKFGIRTENELICRKGEKNEYGQFMYFENLTYVPIDLDAIDPNQMTDREKGYLNAYHARVYELVSPFLNDEEAQWLKKYTRAIMANNELQIAGSQGEIRIRPYEHHAKYYETDQMGIIHHSNYVKWMEEARLDLMDQIGLNYRQMEDMEIISPVLSISVEYHSMVHFDDTVVIYTKLLKYNGIKMELEYVMKDKETGELRTTAKSSHCFLNKSGKPISLKRMYPELDTKFFEFKEAMEKSFEEVLVQFYVDQYRENAKRSTGKPVKLAHYIHRLNNKAKSIKYARFSKNETVALDKLHQEIKRLALITYYSNNKNARQILNREILPQLVRVDMEQFDEKEAEYLTEDFLKLLRKEYIGAICTRSMKELYNEFRSKELRREIVTLVPARPELEFPKAQSMKRRFILHIGPTNSGKTYQALERLKLAQNGVYLGPLRLLALEVYEKMNDAGIPCTMLTGQECLEVSDSRITASTVEMLDCDKEYDIAVIDEAQMVADDDRGHSWTRAILGTLAGEIHICMSPVAKDVVIHLINLCHDEYEIREYERKTALKLEDKPFSFPQDVREGDAFIVFSKKSVLNIAGRLEENGIKPSVIYGSLPPEIRRRQMTLFNEKKTQVVVSTDAIGMGLNLPVRRIVFLEVEKFDGVSRRPLVISEIKQIAGRAGRFGLYDTGYVTALGQKNLNYLKNTLNIPEQDIDIVSLGFPQVLLTMDAPLDAIIKLWHEAEPSAPFRKINVDEILFLYGYAYKERYFIADFDDKYLLYKMITCPIDIKDRELVRQWLRYCMSYTSDISLDKPDKHSKYQGLMKYESYYKKLDLYYQFSVRMGKIVEEDWLENERDKTQAKIMQLLSKSKDEYIIRCRYCGRILPIGNSRNICRDCYSMIRRMNKQNKKIAQEKRRIERERAEKKAKVVNLLKFWVPVVAVVVVVIVLIWAVATSGGSSSNSTDGTEAASQTTESQASETQSSDSQTEAATLNTETDTVAENGDKVNIDYTGYMDGEKFDGGSTDGQGTDLVLGSGSYIDGFEDGVVGHKVGETFDLNLKFPDDYKANTELAGKDVTFEVTLNGVYKMNFVKKHPLLTAFLIPFFICIIICIGNGVYPFGDYCLLHMDLYHQYLPFFNELWEKLRNGASLMYTWNIGLGSDFVSVFAYYLASPLNWLVVLFPKSHIIEFIELLIIFKISLSGATFFYFLKEHFVLLGKDNRYHNNTFVPAFVFSTAYALSGFVAAYSWDVMWMDVVAVAPLAIVGLEKLVRDKKPVLYYVSLALCILSNYYLSIMLCIFLVFWFAWLFFTQNGGKMAAIVRFAVYSLLAGGTAMVLIIPELIILSYSGSSGIEFPKQIEWYFNLLSEVGRMCTTASVYEGAENWPNLYAGAFSVMLLILFVLNKRINWKKKIAPVLFVLFFMASFANKQLDFIWHGLHFPDSLPGRQSYLYAFLVLTIGYVTVRKWRGIRLWHIGVAVVFASALMAVSTMFAGEDVTEYYAVIISILFVALYGIMTVLLKLAASKNRELLMVITCGIAIVELAVNMAVTGLGCTGRSSYNANVDDMQKALKLAKEDAADNNVPFYRVEDTGRLTKNDGTRYGYASGTQFSSLMNINVSHFYQALYMEGGKNFYCYNGATPVTSAMLSVRYMVTKSIQPQNELTTLVGKCGNHYLYRNNYTLPLGFMMDEGVIDAWKPSSSSKIYSINSLGRLLGAADDTLTLTECIQDENPGTTTLTFDHDGYYYAAYDSCSTDSLTFSHGEYETTYSKTTHRYLFDLGYVKAGDTVSVTNTAADAVRFNVYELNAAAVEGAYNALNDQTLSVENFSDTHISGHIDVKEAGRLVLSIPSEKGWTMKVDGKDAEYEDFSDTFVSIHLDEGEHEIELYYETPGLKAGAAISAGCVGVFLLLLLFRQIVKRRSRLKFKANSDRMIKKIYKKYEIIFNVVLFSIFPIAAFYLMEFYEHNPFEEVRFMAGFFNIILFELIAWILYFITGRAKWALRAVFIVAMVFGLINHYVMLFRSTPFVPWDIFSIGTATSVASNYDFAPTAGVVVVTVIFIALIMLMHFVDFRIKWKFRFRLIPTVLGLLVMCLFVNALQDEDFQTDNYLYPFLFTPAYMTKVNGMAVTFAMDLKFVAVDKPDGYSRQKAKELLDSYAGTDDNSDAANNTAITDKSDYPNIIVVMDEAFSDLSVLGDFDTNTDYMPFVHSLEKGNENTITGYLNTSVCGGNTADTEFEFLTGNTMAFLPVGSIPYQQYIKSTTPSLASYLKSIGYATYAQHPYYGSGWNRDTVYPLLGFDNLSFMQDYSNQRFVRKYISDETSFDRIIETYENKPDGQPAFIFNVTMQNHGGYTDTYYGFDNTVTADKLNNSALDQYLSLIKLTDEDLKSLIEYFSNVDEKTIVVFFGDHQPNDTVASSVLAANGMDYNNLSNEELKLRYQVPYVIWANYDIDEAAGKDTSVNYLAANVLKAAGVPTNDYQSFLLKLQEEYPIISAVRTDKTADKTLDKASNKSDKATGSKNKQADSDMLNDYKLLQYYRLFDWEDKMDRKKIFWAIASVFIAILSIWTVVSQSKHFSFEILMSFIINANKGWLFMSFFCTFGFIWFEGFALVRMARHFGYKTSAIDGTVYGGADVYFSAITPSASGGQPASAYFMIRDGIPGYAATVALLINLVMYTLSLLTIGVLCMIFKYPLLKNFSGISRIFICLGIVVLIFLALVFYMLLRKGNILYSICDSLIRLFERIHIIRHGGRLRIKLKNTMKEYQECSNSITGQTGLLIEIFFWNIMQRVSQLLVSFMIFMAVGEGVNKAVDVSVIQCFVAMGSNCVPIPGAMGVADYIMIDGFKQLVGRNAANMELLCRGMTFYGSVITSAVIILIGYIIRKKVAKMEQKKQEPIRDARQLGTAKMFILGLQHMFAMFGATILVPILVSGYFQKACGEPLTRGLSVSVTLFCAGFGTLIFHLCTKFKVPAFLGSSFAFLGGFYTVANLDSGMYADMAVNDKAAYACGGIFVAGMLYFILALIIKLVGIKRVMRFLPPVVTGPIIICIGLSLASSAINNASTNWVLAIIALGVIIIFNIWGKGLFKIIPILMGVIISYVVALIMNAAGITNPDGSAILDFTSIASSALVGIPKFQFMKFDITSILVMAPIAIATMMEHIGDMSAISATVEQNFIADPGLHRTLIGDGIATAFAGAIGGPANTTYGENTGVLELSKVYDPRVIRIAAVFAIALSFIPKFSAVISTMPSAIIGGVSFMLYGMISAIGVRNVVENKVDLTKSRNLIIAGVIFVCGLGFGNGLTFTVAGTSITLTALAIAAIAGIFLNAILPGNDYEFGKNPDGDASRGVYMMNTDNDEEEESMKYGFCRRVCINLDLIGRRFAKQIHRDEAKWNRDEFFGVDMQIIFIHHSCFLVELDDKVLIFDYFDGDKVEGMHFTGKLPSYEPDTKIYMFASHSHKDHYDMDILRLADKYPNIHYIFSKDIRISPHFLSKHGIDPAVRDRVTFVSPDNTYHVDDLDIMTLRSTDAGVAFYVASNGVSLFHAGDLNDWEWDGAGDLINGRVRRAFRHEIKKLSEKPINVAFFPMDPKLMEYQFKGFDYFLQNTSAEFVFPMHMWQDYSGITEYKKRLSNKEMADRVIEIERENQTFAFGENYMGDFFMCVAQYVIIMIVLAAIGFCGALIGVKLRKMKDAKTKEMKKSYGVNELRRMYLEFFESKGHLAMKSFSLVPHNDNSLLLINAGMAPLKPYFTGQEVPPRRRVTTCQKCVRTGDIENVGKTARHLTFFEMLGNFSFGDYFKHEAIAWSWEFLTEVLGLEKDRLYPSIYGEDDEAFDIWTKEVGVPADRITRFYRDPKTGECDNFWEHGAGPCGPCSEIYYDRGEKYGCGKPDCKVGCDCDRFMEVWNNVFTQFNGDGHGGYTELEHKNIDTGMGLERLAVVMQDVDSVFDIDTMKAIRDKVCELSGKKYHVDEMDDVSIRLITDHIRSSTFLISDGVMPSNEGRGYVLRRIIRRAAMHGRTLGIQGAFLGKIAQVVIDESKDGYPELEERKDFILKVLTQEEEKFAKTIDQGLGILADMEEHMKADGVKVLSGEDAFKLYDTYGFPVDLTAEILEEKGFTYDEAGFESCMEAQRQKARGARKETNYMGADANVYNDIDSEITTEFTGYDKLTDTAEIAFLTTSDDVVEALSDGDKGSVIVPNTPFYATMGGQQGDKGIIKTESGTFVVEDTVKVVGNRYAHVGYVSEGMIRTSEKATLSVDTKTRTNTCRNHSATHLLQKALREVLGTHVEQAGSYQDAERTRFDFSHFSAMTAEELKRVEDIVNEKINEAIEVRTDIMTVDEAKKTGAMALFGEKYGEKVRVVSMGDFSKEFCGGTHVKNTSDIKVFKILSESGVAAGVRRIEAITGDNVFAYYSNMEKELEEAAKVVKSTPANLKERLEHLMAEMKALQSENESLKSKAAKDALGDVMDQVVDVNGIKLLATSVDGVDMNGLRDLGDSLKEKLGEGVIVLASSNEGKVNLVAMATDAAIKSGAHAGNLIKAIASKVGGGGGGRPNMAQAGGKNPAGIPDAIASVKDALSGMIKMSSVIVKENETLDSALRRFKRNCAKAGIQQEIRKREHYEKPSVKRKKKSEAARKRKYNMTKIDIISGFLGAGKTTFIKKMIDEAFKGEQIVLIENEFGEVGIDGGFLKDAGIQITEMNSGCICCSLVGDFGKNLNEVITKYHPDRILIEPSGVGKLSDVMKSVIDIEKEQPVKLNALVTVVNALKASKQMKAFGEFFNNQIEYATTVILSRSQNATPEQLEFCVKQIQALNPKASVITTDWDAIKGEQILKTMEGQDNLEMKVLAEARHAQDEAEHHHHDHDEHEHHHDHDEHEHHHDHDEHEHHHDHDEHEHHHDHDEHEHHHEHGEGCTCGCHDHDHEHGHHHADDVFTSWGKETPHKFERAKLEEILKQFVEDDKILRSKGMVEGTDGKWIYFDMVPGEYEIRDGEPDYTGRIVVIGTDIHEHELEELFGLVMAEEIPVYLFTGFMDSGKTSLIKDTIFENDFANGSKGLIIMCEDGDVEYDMDKLKAANIQVAEIDSEDEFTAAKLNELNMQYLPEQVFIEYNGTWGIDKIIEAELPKGWVIVQSLATVDSTTFDLYMNNMRAMMQEQVFASDVVIFNRTDDDTDRGHLRRTIKNINRKAQIVYERKDGTIDERPEELPFDINQDVIELSDADYAIWYMDAMENYKKYDGKIVKFLALVYNPDKLRKGVMVPGRFAMTCCIEDVTFIGFKCKYEDESSIPHKSWITITARVHVEFAREYKGKGPVLYPVSIEPAEKPQDELVYFSMYPIVRKEKLADNIILMDIKAPRVAKECLPGQFIIAKTDEVGERIPLTICDYDREKETVTIVVQTIGAGTERMMALNEGDSLEDFVGPLGCPSELCQEDNLEETKKKHIVFIAGGLGTAPVYPQVKWLKEHGVDADVIMGFRNKDILFFEDEMKAVAKNLYVCTDDGSYGFHGNGSQQLQALVDAGNTYDCCVAIGPMIMMKFTCLLTKKLEIPTIVSMNPIMVDGTGMCGACRLIVDGKVKFACVDGPEFNGHLVDFDQAMKRQQQYKTEEGRAKLAYEEGATHHGGCGNCGGDKMEVDVLKRVPVREQDPKVRATNFEEVCYGYNKEEAMAEASRCLNCKNAQCMKGCPVSINIPAFVEQVKNGDFTKAYEIISESSALPAVCGRVCPQESQCEGKCIRGFKGDPVSIGKLERFVADTARENGIKPKTAAEKNGKKVAVIGSGPAGLTCAGDLAKLGYDVTIFEALHAAGGVLSYGIPEFRLPKDKVVAAEVENVKALGVKIETNVVIGKSVKIDELMEEEGFEAVFIGSGAGLPRFMGIPGEQANGVFSANEFLTRNNLMKAFKEGYETPISKGKKVVVVGGGNVAMDAARTALRLGAETHIVYRRSEAELPARKEEVHHAKEEGVIFDLLENPTEILVDENGWVKGVKLIKMELGEPDASGRRSPIEIAGSEYEMECDTVIMSLGTSPNPLISSTTIGLDTNKRKCIVATEDTGATSKEGVFAGGDAVTGAATVILAMGAGKAAAKGIDEFLSAKMIEQKEHFHGSDLEKIEKIYGIKKENIVSFAANVNPLGESGKLKTALSERIDAITKYPDREYTSLRKAIGSYCKCDYNHITVGNGCTELISLFIQITAPKKTILLGPTYSEYERDLRINGSDISYYFLKEKDDFKINPDEFISAITADTDLVIICNPNNPTGSLITPDKLKTILTHCKETNTYVMIDETYIEFVPDVDELSAIPLTELFDNVIILRGTSKFFATPGLRLGYAITSNSQILTDINTNKNPWMINSLAVVAGETMFLDEEYIDKTRSLILSEKTRCRQLIEKSHKFKLYPSYSNFYLLKILDEGVDAHMLFERAIRQGMMIRDCSTFPGLEERFIRFCIMKPEDNTRLINCLTQMYKKSTFNVNGVTIVRARIGQIAAGRFNGTKPILAFSEETIDLSVIEGRSEAGSFVIESTNQIKICGIVYSTNPRMECLNPHFEGEKVRIRYQFNSKGLTEGDACEGKFVIVCNQIEYSLSFCARITRLYAEASTGAVKSLDDFTRLAASNWDEAYHLFYNRNFLNTIPYDNVYERLTYEGFACARPSGQNMEEFLIGVNKKKPVSISVDKSEEIFMASKEPQSGCFTITKDNWGYTEIRLRTDCEFIKLSKPVLTHDDFIGKTYLYEYIIDASAMHAGRNFGRIYIDGVYQSFTIDITAGVRDDDGSISGIAVTKDIKECMVGIMELYTGFRLKRIVTGVWANETISILNHLHALMPDEHMYELMKAQAFIINRQRQEAKWILDDFKHSNPDKKAPIWGYYLYLMTLLEREPSYIDNMTHEVELIFYENPDSVLLFWVLLFLRNQYFDDNAGKLKDIKYWVLRGCSSPYLYIEAYYLISQDPYLIKELSVFELHILSWAVKKKALTKELARAIFEAVDLAGGFDNRVYELLTAAYEICPEAEYVGIICSYLIKGHKNDTCFHKWFELGIENKLRLTGLYESYLITMDDRQISPVPKIIQMYFSYDNKLPYRKLAVLYNNIIAAKETEPEVYHKYRKAMGRFAMDQAQLRHIDDNLAVLYEDMLELGFINEELSAAFSDIIYTHKLIVFDKRIVRAIIYQNEMKEPQIVPVTDQCAYFELFSNDYVILFEDSRGYRYVKSISYRLQRLMDAEKYLDRCISLSPDRPQYIVSHFKNVRDYSDFTKGDLKLFKPVFYSESFSDSYKAVMGYRILKYCQLHDYEDYVRPFLQSIDFDILQKDARKYLIDMLVSNRLYEKAYDMAMEYGIDMLAAASQVVLCENALKVQHVDDDFMVQLAISAFKTGKYSDLVLKYLCENYTGPTDELINLWHAADKFSISSMKLDERILEQGIYTQIEPEKISDIFLEYYKRAGNDKLILAYISLVAHGYLHSGMCKVDFIFDIIEKRFIGNRTLNDACQLALLKHFAKKTDITQAELEIEDTLLKYYIYNNMYFDFFARLDYRLLKKYFIYDKAFLQYESTPGAHVVLHYSRDEDGEEFNSEDMVEMYDGIYVKAFVIFFGELIRYYITEEHDNSIEVKESNRLTCSNIPGDNDHSRYNLINEMIISDTLSDETTLKSNIDEYKRLDAATKQLFKLIMGHNGNSYYIGIDLNDSYAMVSYFQQNMKEPETVSTVAGSEEFQIPLVLARRKSIGKWYYGDEARRLSKSGEMVCIDQLLKRALNSEKIVIDDDSFMAEELLALFLKKVMELPSKLGNPSSFDRLVICVDRLTKENVSMFYGMAVRLGINSRQLTVIDRKESFYYFALNQDKSLWLHDVVMFMQEKESIFFYSLKRDLRTTPQVVSIDESISYTLDKNDKDKSFLDIINESFKNQIISTVFLVGDTFAEGWMKQSVALLCKGRRVFMGNNLFTKGACYAAATRDKEAEWPFVYMGENEMKFNLSLKVHDKGELSFYNLISAGSNWFESKGQCEVIISGSYEVDFWKQLPKSREAKIETLRLTDMPPRPDRATRIRITATPVSDDRIDIEIKDLGFGEIFMSSGKVWHYEMTMMGELLLCNEAIAAMPYYIEGVSINVYSIEELNYYIINNTYLLDDDFMSLELCTWIENHAHLPKLAMHLRTIISTNGRLSAFVTELLEYSGYCTKEELKNTHDALKKLEEKSEFECLKIRADRLMEKKKYTAAIFEYKKLLSCEDAKHTERVLYGNIYHNLATAYVQLFLFDIAADLYLEAFRQNGDRKSLWSCLYAYKLDNNATGYARIVREYSVTEQEINNLDSVLKGVCAEASDGCDEGRQKETILKYKEDYRAHVIMSKIRTRFAPSPTGRMHVGNLRTALYAYLIAKHEGGDFILRIEDTDQVRQVEGAVDIINRTLKETGLVHDEGPDKDGGCGPYVQSERVAQGIYMKYAKELIDKGEAYYCFCDKERLDSLKTTVAGKEISIYDKHCLHLSKEEIEANLAAGKPYVIRQNNPTEGTTTFEDEIYGDITVDNAELDDMILIKSDGYPTYNFANVVDDHLMGITHVVRGNEYLSSSPKYNRLYEAFGWDVPVYVHCPLITDEEHHKLSKRCGHSSFEDLLDQGFLTEAIVNFVALLGWSPSDNQEIMSLPELVEKFDYHHMSKSPAVFDFTKLKWMNGEYIKKLDFDKFYDMALPYIKEVVTKDYDLKKIARMVQTRIEIFPDIKEHIDFFEKLPDYDIAMYTHKKMKTNPETSLEVLNDVVPILESCDDFSNDSLFETLKAYATEKGYKIGYVMWPIRTAVSGKQMTPGGATELMEVFGKEESIARIKKGIEKLSNNMNFNKAQHSAIEHKDGAMLVLAGPGSGKTAVITHRTKNLITKHHVKPSEILVITFTKAAANEMKERFNSLMKDESANSARTVRLFRNRRYIHSDLVVRVFCAVEVLKLQVPKQQNSLEETQQWLTEGGVISAVKSFYFLEEHDALGGLERVGTMLDKARYSTMLSKGVHDYFKDTYGRETHFIPNGVNRQEIKDAKFITEKFGLTKDSYILFLGRLVPEKGIRYLVEAFKDVKTDKKLVIAGGSSDTDSFMAELKDLAKDDNRIIFTGFVQGQMLDELYSNAYIYTLPSDLEGMPLSLLEAMSYGNCCLVSDIPECAEVVEDKALIFQKSNVEDLQEKLQNACDHPEMVMEMKKQAADFICKKYNWDDVVKETMKMMAQCKEKLNIAMFGQKRIPSREGGVEIVVEELCTRMVAQGHNVTCYNRGGHHVSGSEYDSKRLKEYKGIKLKTVPTIEKKGLAAVSSSFFAALCCAFGKYDIVHIHAEGPAFFSWLPKMFGKRVVVTIHGIDWQREKWMYRKKGRGWTKHIDFMLLDVLCMQIAFIVSYIWRFGLGNPYIDKDYRILAVAFLLIDFFVEIVSDAFKNVLKRGYLDEFIVTCKHVVFVEIITTFFLFTTQMGEIYSRMSYYIMIPIYILVSYLGRMVFKKIIKKRGFASSKESLFVIAPEKLLRETLQGLKENGFGYTQIVAAATDADLNGKTICEIPIVANHDGIVDYACEEWVDEVLIPPCAESEYPYEMADIFLEMGIAVHRGITKNKVMAGSFNQIEKIGDYTVITASLNYARTTQLLAKRGMDILGGLVGCIITLIVTIFVGPAIYIASPGPIFFAQERIGRNGRKFKMYKFRSMYMDAEERKKDLMAQNKVSDGMMFKMDFDPRIIGNKILPDGTKKTGIGQFIRKTSIDELPQFWNILKGDMSLVGTRPPTLDEWEKYEPHHRARMSFRPGLTGLWQVSGRSNITDFEEVVKLDTQYIEEWSVKGDIKIIWQTAVGVLRNDGAMMSIHLYKHNEDAYRAVETMLEEKQMAAVIHPTGTGKSMIAFKLVEQHPHKYFLWLSPSEYIYKTQLENIDTQFSNIEYMSYSRLMKHEDSIDTLHPDYIILDEFHRCGAAEWGKSVSKLLEAYPKAKRLGLSATNIRYLDNQRNMAEELFEGNIASEMTLGEAIVREILPEPKYVIAMYSYKKELEQLKKRIEGLSNPGLVSENEKLLEQLKRALEQADGLTEVFARQMTKPDGKYIVFCSGREHMDEMKAQAADWFSKVDKKPHIYTAYYNEASTSKAFAEFKKDTGSHLKLLYCIDMLNEGIHVDDVDGVILLRPTVSPIIYLQQIGRALSAGSKNQPVIFDLVNNFDSLYCIDCLKNEMQEAFLLYPDTHSPREHFDDRFRIIDETKDSREIFMRLQENLGSAWDTYYEAAKQWYEENGNLKIPKSYVTKSGLTLGAWINTQRRVKSGNISGNLTWEKIQKLNDIGMIWDVMDSSWQEVLEELKSYRNIYGNLDIKAKYVSPTGFRLGSWINNMRFKVKKYGIEQALTDEQRKALEELGMIWDHNKQKWEEYYSAAKAYYKEYGNLEVPAKYVTADGIPLGRWLSNQTNSHSMTDEQLQRLQSIGYRSESKTAIQWNRKFELAKAYYEKNGNLDVPVSYSTDGVKLGRWISNIRCKRKNPKASGMVLDTERIARLDSIGMNWKMSRRGTNIRKRTDGRWEGRYYIVDTAGSKKCKSVYGHSYKEVTERLLTAKAASLNQTAAPKQSAITVKAVAEKWLESIASSRKCSTIQKYSTIYNKYIKPNWGESVIDELNQNEILKELPETAGESVTKSILCIFNSILAYGAATYGTGEIHLSYRAKRSSVTSSNNINTINTIDQQKLTEYLLTELDIYKLGILLCLFMGLRLGEICALKWEDIDMISRTLHVNRTVQRLPVDTVHTSDSSQNNHTATKKTSLYIDSPKTSNSLREIPIPDFIYDKLSDYYNTSMKGDSYFLKKNQPMDPRTYQNRFHIYIKEAGIGNTHFHALRHTFATNCISSGADAKSVSEILGHSNVNITLNRYVHPNLETKRSAINSIVIPMTKTKRIIGMVLGILFIGLCVSFLRLSQFGVDPFSAMNLGISGFIGWSFGTWQLLINAIILVVVFFQARSCIGAGTIINMIFVGYIADFICYVANDVVQIQMNLPLRIIALLLAQLMASMGVALYMVANMGIAPYDSVAIIIEKLTHQKIPFHKARVLSDVVVVIIGIIFAIASGAGIWSVVGIGTIINACFNGPLIQFFKTKLERFYLMRQIIFHEETKTFHLYNEKISYILCVLENGHLGQLYFGKRLHDKADFSYLVEKCGRPMTSYIYEWDRTFSLEHIRQEYPVYGTTDYRHPAIELLQENGSRISEFQYDSYEIIAGKPKLSGLPATYTESEEEAQTLRIFLKDALTGAKLALLYTIFDEYSAIARSAYIENAGEKNLHVLNMMSLSLDLPDKDYEWMQLSGAWSRERYIKNRTLEQGITAIDSMRGNSSHEHNPFLALKRHNTDENAGEAIGISLVYSGNFRMQAEVDTHDVTRITAGINPEGFDWKLEPGESFQTPEAVLVYSENGLNGMSQTFQKLYAKRLARGYWRDKARPILNNNWEATYFDFTEDRLVEIAKKAKECGVELFVLDDGWFGARRNDRAGLGDWVANEELLPNGIKGLSERIEALGLKFGLWFEPEMVNKDSDLYRAHPDWILQTPGRNTSHGRYQYVLDFSRKEVVDHIYGMMAKLLSESKISYIKWDMNRSITECYSSKLPSDRQGEVFHRYILGVYDLYERLTNEFPKVLFESCASGGGRFDPGMLYYAPQGWTSDDSDAIERLKIQYGTSMCYPLSSMGSHVSVVPNHQVFRNTPLHTRANVAYFGTFGYELDLNKLTEEEIKEVKEQITFMKEYREVLQFGTFYRLKSPFEGNETVWMVTNEDRTLAIVGYYRVLNGVNQPYSRVRLQGLNPDMIYENVWNHTENYGDELMNYGLITSDATAGEVPGNVTPCTDFESRIYMLKGKKVQEVRMEDSYVLQLLKPKFKDFHLCFCGFAECKPLHSYGPAARPNYILHYVMKGKGIYQVGETKYQLKEGQAFLIEPESLTFYQADKTDPWSYLWVGFGGTEAQRFVRDLGLNSRQLICECEYGEELKEIVFEMLHHTRSTAENLYYLQGKLYQFFSVLARGIEIQQYSNDTKESIHVQEAIAYIKNYYSQKITVEDIANYLALNRSYLYTIFMNSLGISPKDFLTEFRISRGKEQLALTNLSVEEIAVSCGYRNSLAFGKVFKQKVGITPTQYRNDNRKDARERLIRAQNELKEYKKHKTIYVGNIEKEMLQKLYVFFRKETVLSIAVILTILSMFWVRPDKAYFTYIDFRTLGLLFCLMAIVAGLKAVGVFDILAQKLLMGTSGTVGVMRLLVLLCFFLSMVITNDVALITFVPLALIIVHKLPKELGNYWLLKIVAMQTIAANLGSMLTPIGNPQNLYLYARAGMSAAGLITLMLPYSATALILLLIWIQIAAAKAPHVCGSEKDKTLLGFSDRKELNIEYLVAYLILFTICLLTVARIIPYQIPLVLVLIYMLLRNMENISRVDYSLLATFIALFIFIGNLGRIPQFSSFLERIMAGRETLTAVLASQIMSNVPAALLLSGFTDNYRALIVGTNIGGLGTLIASMASLISFKYIAKENRNLRGKYLEIFTASNIIFMIFMLILYFFLRMAEIKNSESDMSTQQKAELDKEKRKEEKKEAKRAKRQHYRELNEPPKLTVLEEVGNAVTHGIGAGFAIAGFVLLLLKSDTGIKVMASCFYGISLILMFLMSCLYHSYKSGLAVKRIWRRFDYSSIYLLIGGTFAPMYLVYWENVLGIVLFCVQWALIIAGITIICVFGPGRFRPIHYTLYFVIGWSAIMFIPDWFRNDKPLLGWIVGGGIVYTLGMIPFVKDTKGMHFIWHIFVMLGAALHWFGMYLYVYMTRTGEYLGKLFAHMGKECYIEPPFYCDYGTNIHVGDYFYANTGLIVLDQCDVIIGDHAFLGPRVNIYCACHPIDAMIRNTGVELGKPVTIGDNVWIGGNTVINPGVTIGSNVVIGSGSVVTKDIPDSVIAAGNPCKVIRMITNKDKEYWLKQLEEFEADTGEQVKLEQDMKQTDNFKFDEANVMNELVYRNLSEDAKRQICAWKYGGEYDLYNLPSYEEMQVRQIGFMNPQRKKNYYGFWDESILVGFVNILEEKEEIFIGIGVNPDLCNKHYGQRMLLITYEISKKLYPDKPLYLEVRTWNIRAVKCYQKAGFRIDGQAYELTTGIGTGTFYRMIREMKYDKIVEAFFIERPNRFIARVKIDGAEEVELVHVKNTGRCRELLLPGAEVILEDCIEKNPNRKTRYDLIAVKKLDNMVSGTKISGVAEILGDKVTFLAEFALRKALIRIDVAQHMMSRRKRQKTGMINNENENNSMTQEPQTPQQTVDAQQIVVPQESERIQRAEWIHEQVKLQREAEDEAWEKIMEEQKLLTERRRSIDADINSNRELKRYHEDCMEDITDQVYSLHGISVDKLEGIKEYRNALFRGEAFIVFCISVIMAAIVAYAYGPTSQLCLYVLMCVGAEGALLSQKRKNILFFIPLILIAAEMAGYKLYPQYLEYVTMAGEALALLLMMIGTVGYFVHNPYRKDRKNIKAAKSDLKELHKVAKKSVKKNKKSRIKNEAKEAKLAAKQVKRETKAAIKEQKRQNKLAKKQAKYELKEKKRQQKSERVELKHELKKTQLMDKVRRFTPKEQESESTSSAESIDNNITENNIIENNIIDIERKVNMCGIAGFCNFKEDFEENTDYWNFRLEKMRAVLAHRGNDARGRYLKKHIGLSHSRLAIRDILCGDQPMTRTHNGYDYTICYNGEIYNTDELIPELSENGFVCSTTSDTEVILYAYIHWGADFVNRLNGIFAFAIWDAAKSRLLLYRDRVGVKPLFYAIRGDSLVFGSEPKACFAHPAVKPELDKQGLQELLAIGPAHTSGLSLFKDLFEVLPGHFMIYSRDGLHDETYWELTSREHTESYRDTVAHTRFLVEDAIKRQMVSDVPVCTFLSGGIDSSIVTAIAANYMNTRGKTLNTFSFDFKDNDRYFKANAFQPERDLPYVNRMLEEYETAHSYLECDENSLFKALFAAVDAKDMPGMTDVDSSLLYFCSLVSRKNKVALTGECADEIFGGYPWFYRKELLERYGFPWSSDVAPRLALLRDDVGLELDLSGYQAFRYEESRSKAPLLYDETGEDESRRIIGYLNIKWFMQTLLDRMDRTSMYSELEARVPFADHRIIEYVFNVPWHMKYQNGVEKTLLRDAFSDVLPPELLHRKKSPYPKTYHPGYEALLIKGMEEILDYPNAPVRTLIDTDKTREFLKAPAEYGSPWFGQLMAGPQLIAYFIQINYWMEKYQLSAMSEEERKFLEIVDLKKGFGSGETRQEVLRGMNFSVAKGEFCVLLGPSGSGKSTLLNIIGGIDSADSGYISINGDKLKDMSEKKLTQYRRKHLGYVFQMYNLIANLNVKENIEVGAYLSDNALDIDELLHTLGLYEHRYKLPNQLSGGQQQRVSIGRAIVKNPDILLCDEPTGALDYNTSKEILKLIEDVNKKYGNTIIMVTHNEAIKNMADHVIKLRDGAVRHNDINTNKVSAEELEWMSRKKIKNPLIKRIPKEIIGDWKKYLVVFLFLVLTIGFVSGMYVANDSMLTSADEGVSKYKQEDGHFELKDKADSELVTAIESGEVKTAPDEKDSDSSKTPVTLYENFYRNETEDYDADGKKDGTIRVYTKTEDINLACLIEGSFPQNENEIAVDRMHADNVGMKVGDTIKVSGKEYKVSGLIAYVNYSTLHEKKTDMMFDAIKFDVAMVTKEGFDRLDKSIHYTYAWKYKDEPADDIEQKEKSDDFLEAMVSQVMATGNEVEDYTPRYSNPAINFATDDMGSDKAMGGVLLDILIVIIAFIFAVTISNTIANESSAIGTLRASGYTKGELIRHYLSMPVIVTFLAAVVGNILGYTVFKDVVVGMYYNSYSLPTYHTIWNPGAFIKTTLAPVIIMLVVKLIVIIRMMQHTPLQFLRHDLKKTKRKKAMRLPRWSFMSRFRLRIMFQNVANYLILFVGIFFIMVILAMAVGMPDTLDFYKKNTDSMMFAKYQYVLKSYVDADGNVLETDNSDAEKFDMTSLLRRTDEFDEEVSVYGVETDSAYVKLKDMDSLKGNEVYISDSFADKYGIKPGDTIKLDAQYEKKTYKFKVKGTYDKSQSIAVFMPIEHFADTFDFADGRFSGFLSDTKIKDIDESNIATTITIRDITKMADQLDHSMGSYMQYFQVLCILLSAVMIYLLTKLIIEKNETAISMTKILGYDNREIASLYLVSTSIVVVISDIISVVLGAKVMDIVWRIMLQTFSGWFSFHMTPVGYVKMFAFVLIGYLIVTVFDFSRIKRIPMDMALKNVEMTDNFEFRSIHPDEVEQAIAIEQICFPPNEACSPKAMTERIAKVPQLFLVAIDKSTGKLAGFLNGVATDEERFRDEFFTDIDLCDENGKNVMLLGLDVLPEYRGQGLARELVYRYSQREKANGRKKLFLTCLEQKVEMYKKFGLQDLGIADSTWGGEEWHEMVLEGMENKVSDNVIEKNYRECLKFNEINESKVDNFDLATAKAALENLYELYKNGILTGRFTQDKDYVVRCADLVTLAEENKDSLFYDAWRVWFRYFVSMGYAGWNELWEAVCRCSRRLRSWRKMVFHQVMKPRTANSMNIQIFGTKKCNDTKKAQRFFKERGINFQFIDMKEKGMSKGEFNSVAQVNGGLDNMINWDGKDKDLLALIKYIADEDKLDKVLENPQVIKTPVVRNGRQSTIGYRPDVWKTWKMYYVPDGTEQCGYYECKECGSRFLDLKIAPTLVCPYCGEEADMEIGPDEEIPKVVESAKLIQMVRGVEEVEKMDKLLSLAVTGGDFNWIMSKYIPGNQKHLTLEDRKYKECLSQSSAGINMTRHELHQEDMVITPLIFQGQSPYQIMTNHPELDISVRTLYSYLDKGILTFFLTREKLFLAFIMNRCTKGTVKLVFNKLERQLGIYDFLTLFNTILTDRGSEFGDPESLENGINGIMQSSIYYCDPMRSSQKGGIEQTHTMLRMILPKKTSFEYLTQWDLRTIVDHINSTPRESLGGRTPYDVALAVLGFIQCLSNLLNQCHICDSYFTSASTNICILISSMGIARKKKKKTLKAKMLGILTMCAMTSLLAAVIVSYMELRMIQNDSIEDNMKMYLDQITKNTDEAYYDMISIVNYMGPGGLIGNVTDSYLDAVDNFDRFVEQRSLRQELLGLGYVNTKLVGATYYDKEEKKELISGMNVRTLDGRQNALPKVVKCAGNVMQAAHASFLGSSEKTVFSVMREGVLGNGKKLEIYTEIEADMKTPEEINKEGYPYTYIQTDERGVAQYSVNPVIIQGQKLFSASLSKGEYEVQTRKGYKIMAYRSQMGYINAVALPDNIYHKESNRWKMMMTLIIVVTFLIFSMSVFYLYRMICRPLSQFRRQMVQIGDGTLQAVHEESDIAEFDSLMREVEQMKRQIENLISNMVEKEKSIQKIEFEKLLYQINPHFLLNTLNSIQWMAQMSHQREISEFVQRLKKLLSYNLGKEGCQTTLRRELEIVKEYIALQQMRYDFIIEINIEDGSYLDQPTVRMLFQPLVENAIRYGLGDDEKISIQVFEDVARHFAVVTISDSGKGLNQEEIDEINQPFDYDWEYWKNENRGIGLRYVKAIANMGVTPEVANATIERTDKFRADYYKYYTHGNYWTNPVNYDLTLNSERVGVENCVKTIEQYLIIKGFIKADMIKPVGELIMYRKKGREWTKHIDFMFIDIACIVIAFFISYVIRFGFNNPYVDKDYRILGVAFILIDFCVEIMEDSFKNALKRGYLDEFISTCKHVVLVFMVTALFLFTTQMADIYSRLSFYIMFPIYVTITYVARLALKSFIKKRNFGVSKKSLFVIAPDAILRDTLRTVEKSCIGYTKIVAASLDTDMKGKTICGIPIVANHDGIVDYACDEWVDEVLIPPCSEDEYPEKMADIFLEMGIAVHTGIAKNGTAQGGYKQIEKIGDYTVVTSSENYANPSALLVKRGMDIVGGLVGCLFTLIIMIFVGPAIYIASPGPIFFSQERVGRNGRKFKMYKFRSMYMDAEERKKELAAQNKCMEEKQTIVACGAGASTKRVWPVPNPDGTHRIDRCENVKDAGQYIARIDEMIERKQRLFEEKMKQRVKQLAITERSVKMKKIVAVVIIMFIFSIIILGVGSKLVFQKICERRETAWPDLGTADDEQYEWLTEAYKIKQKNNEKIVILASDGTKLEGHYYERKKNAPLVIFFHGFRSHSYVDGVPIYKIAQKEKWNVLLVSMRAHDESEGNIFTLGVKERYDCVDWANWAAKHFGRETPIFLMGISMGGAVVTMSSDLDLPDSVCGIIEDSGFTTSTKMLELNCKSSLPKGMPVEVFKIFADVGIKLWGGFNLKEADACKSVSQTKIPILIIHGDKDNLAPLYMAKEIYNSCKSSKEIYIVHGAGHAENYKKDPEGYEKIITTFIKERVPMRNQRSIGVNAGLNMIRTAFQVIFPLITFPYVSRVLHVENIGIYNFCQSVISYFSLLAALGISTYAIREGARYRDNEEKMSLFASEVFSINFISTVFSYLILGVCILLVPRFNQYSSIMVALSISIMFTLIGSEWIFQIYEDYKYITIRGILFQFISLILMFVLVRNSSDLFAYVWITVISCSGANILNAVSRRKYCKIRLTINAKILTHLAPILVLFATSVATTIYTNADTTMLGFFSGNKSVGLYSVSTKIYTIVKQMLAAIIIVSIPRLSAYLGEKKIDYFNRTANQILNALVVIVVPAMVGLIALSKNIVFIIAGQEYVDANISLKILSVALLFSIFSWFYTSCILIPYRCENKVLMATIVAALVNIGLNFILIPTFQQNAAAFTTVIAELLSMVITWWYGRKYFRVSFLKKDILSVAIGCLAIWTICSISEKYISSVLISTVFSVTASVVIYMIVLLIMKNQAVKLVLEILHIKKMDDLISVIVPVYNVEDYLEKSLSSLLIQTYRKLQVIIIDDGSTDNSGEICDYYGANDGRIEVYHIQNAGVSNARNQGLNYAKGKYIYFFDPDDSLEPDALWTLYKQIKNGADLVECSYFKDFTNVKEEVIHPEKKISSQEAIRSLLLWDGYLTSFCWDKLYNKEKIGDIRFDSKLKIGEDNLFVFEYLLKCESVIVLDCPLYNYLIRENSAIGNVYTEKKKDSVRAAGTIYEICSKRSMMHYEAKIHVGLASFFSYANLLNTVPYEKIKEFKSDCKFYIDSMKVCSCGLLWKLVGIKMTILYKTAQYIPFLYKASGFIRRKSRMEWLTLFIYILIIFFNIFFDKFIPYANYTDELICLLFMAIAIVYICKDKGKVAVNKEQKNSILCILLVLFIGIVGNVMYGYMPSVSVIGRDIIGTFKFFIIYLVGIRIIVKNNIRLNSKKIISTAKIIITVIFVFGIVNLLVNTGIADEVRYGLRSYKFIYSHYTYLVYNEVLLYSILATEDKRNAVFKIMSLLSIAATFRTKGFITIAFILAYYLLNFAKKKRISFKDIFKPVYIAPIGIVCFFISKSKIQQYLSWGASQSIRVGVHSVGLKIANDHFPFGTGFGTFGTNISYKNQSQLYNIYNSLNYSHLMNYGYATMSDVYWPSIYVQFGYIGMIVYVILIIQICKDLLNNAMLNNRCKFSILLILFYMVSASLSEATFSNESGAFSAVVILIIVAISRKNALIKCDCKDNEGINCGMIPKMIHYCWFGGKPLPKDVLDCIKTWEKYCPDYEIKRWDESNFDVNSHPFMKAAYEAKAWAFVSDYARLKVVYDNGGIYLDTDVELLKKPDFLLENQCYIGIQQPESLCNTGLGFGAQKSSPVVQKMMECYDSISFTDQKKSTFACPWLNDKVIRSFGKVSNEDITYLKEVTVYPPRFFDPLSTGNTKNLLCDETVSIHHYAATWAGNKQRWKRKLIRFFGEDRYFKLKKLFRRVQMKILHKFYIGLVSAWKMFCAKVCAHGKLQVKWVNSIRGAFKTEVIGNGSITIGRFLMSRGPLYLKSVNDGKLTIGDDVFFNHNCSITCAEKVTIGNHCMFANNIVIIDHDHVIGGNGVTGELTARPVIIEDHVWCGANVTITKGVHIGSGAVIGANAVVVNDIEAHAIVAGVPAKRIKMRKFKVVMITSYFDRNGVTSQVINYATNLDKNKFQVAIAAGEPYDIGYEKACQENNIELCKLPQKQKNAYMYYKTIYSFLKKKKPDIVHVHGSSTLIAVELFTAMLAGVPVRISHSHNTTCSHPLLHETLKPFLKVVSNCYLACGELAGKWMYGNGAFKVIPNAFETEAFALNSETRLLIRKKLEVGDNLVIGHIGKFNNQKNQNYLIRAFEKLSYEDDKAILLLVGNGPDLEEIRNQAQHTACADRIIFWGATENPEYLYSAMDVFALPSRFEGLPVVLLEAQISGLPCIVSDKVTREVDFGDIIWKSIEDDPQIWADTILSMGQRTEVQRKQYRLQHVKQIARYDIKESAKLVENIYECKLLKKKMKELLIMAKSLGGGGSEVALIELINALPEELYNITLVLLDSDNEYAYRLKKNVNIVQLTFNSSFAKSLVSMYAFPAKVLKKLSVNSFIAYYDFISNCVTNVFEKTYDIAIDFYGYGSFVTAFLATKIQAKKKATWLHDEKPYWMKSVQKYLCEYDKIYGVSQAVVDAFCREYPHYKDKAAVFYNVIDIEEIKRKSEQDEIIPFKESFNIVTVGRLTEQKGYDIAIKAASILKKRKINFAWYAIGGGRDEKKLKKLVEKYCLENQFVFLGRKKNPYPYMKHCDLYVQPSRHEGYVITLVEARALCLPILSSDIPSAREQIQDGINGYVAELSAEDLADKIEYLYNNPSQRKKTVEYLKEHPIDFSTELLKLEIIMIFVTVGTHEQPFNRLIQKIDELKKDGIINEDVIIQTGFSTYEPKYCQWSKLIPYQQMVKNVADARIVITHGGPASFIMPLQIGKTPIVVPRQHQFNEHVNNHQVEFARNVAQRMGTIIPVEDINTLGDIITNYDQIVADMGHGMSSNNAKFNEKLEKLVDDLFGGENMKVCLVGSSGGHLTHLYMLKPFWKDKDHFWVTFDKEDARSRLEGEKMYPCYYPTNRSLKALIKNTKIAWNVLHKEKPDLIISCGAAVAVPFFYIGKMMGAKLVYIEVFDRIDKPTMTGKMVYPIVDKFVVQWEEQKKVYPKAVNLGSIFMGKAYRFYALCSKTSAQELHFFNILVGDMSLVGTRPPTLDEWEKYEPHHRARMSFRPGLTGLWQVSGRSNITDFEEVVKLDTQYIREWSVKNDLRIIFKTVVSIMQSDGAIMIVVVFNKPDFEYDVHSLLKEFFPQEDVQMYYSCSPDEVEGKNLACTHHEMTDDGVKEFADASQVFKIDYVGDEIAVEWTLNRAGKRICTKISVDSADRKETKNRLKLALYSMIENGTGKSLPWGTLSGIRPTKIAMKCIEDGMSDKETYDYLKKTYLASDEKIDLSIGIAKREKALLDRVDYDNGYSLYIGIPFCPSTCAYCSFTSYPLGVWKNRVDDYLDALEKEIDYTAQKFYHKKLNSIYIGGGTPTTLSPAQLDRLIRKIKCSFDLKDCLEFTVEAGRPDSITREKLMALKKNGISRISVNPQTMKQQTLDIIGRHHTVDDTIQSFKLARELGFNNINMDLIMGLPEETLDDVRHTMELVKELAPDNVTIHSLAVKRAARLTIFKDRYRDMQMVNTQEHMDLCAAYCKQMGLEPYYLYRQKGMAGNMENVGYAAKGKAGVYNILIMEEKQTIVACGAGASTKRVWPVPNPDGTHRIDRCENVKDVGQYIARIDEMIERKQRLFEGKMVNMKIDHFVVGPVQTNCYFVTNIKTKEMIIIDPGACADQLAKKVDESGAKPVAILLTHGHFDHATDAKPLADRYGIKIYIHEADKATLDDPQLNVSYMMGQSKTFYADVFLKDKQEIDIAGFHIVVLHTPGHTPGGCCYYFPYEDVIFTGDSLFCGSIGRTDFKGGSMSDLVRTVKEKIMTLPEHTEVYPGHNDTTTIENERMYNPYLMADYSTEELEKIADKFRSDTSGIRGTKDFTSPEELYDELKKEIKKYHPSDDTSLVDKAYRVAYDAHKGQARKSGEPYIIHPLCVAIVLAELELDKETIAAGLLHDVLEDTIMTMDEMRAEFGDDVAHLVDGVTKLKHLHLTDSTKDPKDKNADRLEMQAENLRKMFLAMAKDIRVILIKLADRLHNMRTLKYQSKEAQQRIARETQDIYCPIAQRLGISKIKIELEDLCMKYLYPDAYYDLVEKVALRKTERDTYIQGLVNDVKKYVSDAGIKAEIYGRAKHFFSIYKKMVNQDKTIDQIYDLFAIRILVDTIPDCYAVLGIIHEKYKPIPGRFKDYIAMPKQNMYQSLHTTLIGPSGQPFEIQIRTYEMHRTAEYGIAAHWKYKEANNGNATTTTVTEEEKLSWLRQILEWQQDMSDNKEFMTLLKSDLNLFSDNVFAFTPSGDVKNLPKGSTPIDFAYSIHSAVGNKMVGAKVNGKLVPIDYVIKNGDQIEIITSQNSKGPSRDWLKVVKSTQAKNKINQWFRSELKEENIQHGKDLIAAYAKAKGINFAEINKPEYQEKIRRKYGFHDWNSCLATVGHGGLKESQIVNRMYDEYKKDHVVPVTDAEVLGSIAEKQQAAAGTQPEHKSKSGIVVHGLYDVAVHFSKCCNPVPGDEIVGFVTRGRGISIHRTDCVNIINLSKIEKDRLIEAEWQDTALMDNGAEYQADLKIFCHDRPGLLVDITKIFTEKEINISGIQSKTSKQGIATIEVFFNIRGRDQIKVLVEKLRQIESVIDVERTTGMKQYAYGVDIGGTTVKMGFFETTGKLVDTWEIPTRTENSGELILPDIAASIKENNEKHGIEMGDIEGIGMGVPGPVKDDGTVLRCVNLGWGVFNVAQSLSVLCGGIKVKAGNDANVAALGEMWQGGGKGHQDVVMITLGTGVGGGIIREGRIVAGVNGAGGEIGHMPMVDDESECCGCGKKGCLEQYASANGLVRVAERYIAAHRDVATKLDLNAGFTAKDVCDAAKAGDAAGIAAVEQSMKLLGKAMAAVACVMDPEVFVVGGGLSKAGSIIIDTAAKYYKEYAFHASRETEIKLATLGNSAGMYGGVKMVIGMIIIIDEASAKLASFYYHDEILKPQWKRAVEMTSAPADCIWIVSNRQQKQIADSLGIASVGEPQCGTHYAVESLAEIDIEYLERVRRRYNHIPWDIGETDRCLIRELSLSDLPALYELYDKPGMTDFVQPLYDYETELEYQKAYIENMYGFYEYGMWLVFSKETGKLIGRAGLEHDELGYMIAPELWNQGYATEVCRFIIDYARENTDFEELYCRIDEKNTASVRLAKKLGFTYSGHMDDDINASIYRKNIKNNEKHMAQNPIVTITMENGDVIKAELYPEIAPNTVNNFISLINHNFYDGVCFHRVIKGFMLQGGDPDGNGTGGPGYEIKGEFTHNGFKNDLKHTAGVLSMARTMIPDSAGSQFFIMHQDAPHLDGEYAAFGKVIEGMDVVNKIAEVRTDYMDKPLEAQVMKTVTVEAFGVDYPEPETVMSDKYMKNLTFANIAKACDGTYIGDETQLDTTITGAVIDSRQVKEGYLFIPIKGERVDGHKFIPTVFEQGAAIVLSEHELTDPAGPYVLVESTTDAMKKLAAFYRKSLDIKVVGITGSVGKTSTKEMISSVLEQKYSVHKTAGNFNNEIGLPLTIFGIRESHQVAVLEMGISDFGEMHRLSTMSCPDVMVITNIGYCHLEFLGDRDGVLKAKTECFEHMMPDAVAVLNADDDKLATVQTVNGKPAIYYGKESSSGVHKSVYTTNIENLGFDGMKAHFVTPEGEFDAHIHIPGEHNVYNAMAAAAVGLQLGLTIAEIKSGIEKAETIAGRTNFIKTHGMTVIDDCYNANPVSMRSSIEVLSHAKGRTIAVLGDMGELGSDEKKLHHEVGEAVGENHIHTLFAAGELAKEYAAGAAEKSSDVDIHYFEDRETMTQELLSYVKEGDTILVKASHFMEFPKVVEALSEMNIVVLAGGLSTERDVSFKTGSMVAKALKENGHKVILLDVFMGYSDREEDLTGIFDRADEISVQVSDIPTEAPDLAKVKASRKDQSPCFFGPNVIKMCQMADIVFMALHGENGENGKIQAAFDLFGVKYTGSDYLSSAIAMNKETSKQFFLANGIPTPKGISMTRATRQDDITKLDLTLPCVVKPCCGGSSIGVTIVRDAAEFKAALDDAFKWENELVIEEFVQGREFSVGVIEGKALPIIEIAPKEGFYDYKNKYKAGSTVETCPAELPEQVTKDMQHYAEEVARVIGLDTYSRSDFLLNDKNEMFCLEANTLPGMTPTSLLPQEAAVIGMSFNQLCEHLIDISLKKYEVMYYEQKGLINLDDIVDIFIEVGNIHNYLENAALRILLFGNPELNFYQCRLLVLKYGESLSQDDLHGRMVFMRMIQLLEVNTVMRITISGKNIELTEGLKQAVEEKLSKLEKFFKPDTDVYVTLSVEKDRQKIEVTIPAKGHVIRSEQVSSDMYVSIDLVEEVIERQLRKYRTKISAKKYAPAIFQDDFVEADDAEDEEIKIVRTKRFGMKPMYPEDACIQMELSGHDFFVFRNAENDEVNVVYKRKGNTYGLIEPECMLYQISNGAVAFGDDVILHSIDFEIRNTEKIAIVGRNGCGKTTLLKLISGEVEMEKLDSDESAFIAKAGNPEIGYLKQIAFDDPDVTLEQEVRKCFVKMDERKAELARAAAELEHDYSDEKVARYTAMEEAFKDDGGYYYEKEYEVMIRKFGFSDDERKKPIRDFSGGQQTKIAFIKLLLSKPDILLLDEPTNHLDVTTIEWLEGYLKSYPKAVVVVSHDRMFLDNVVDVVYEIEYGTARRYPGNYTNFIARKKENYDKQMKDHIAQQKEIERLQRMVTRFKGKPTKTAMAQSKQKAIDRMVIIEAPDKYDNKTFHANFQPEKETGNDVLYTSELAIGYDHPLSVVSLDLKRGEKLGILGGNGLGKSTFLKTIVGKIPALSGEYRFGTNVQIGYFDQQMAMYTSNKTVLDDFWDEYPNLTETEARNALGAFLFSGEDVFKNVNMLSGGEKVRLALCKILKTRPNVLVLDEPTNHMDIVGKETLESMLKDYKGTLIFVSHDRYFVKKVATQLLVFEDGTTNLYQFGYEQYQEKLDREAEESKNVYRGNAIFGGAISQNGSSQTGSDANRSTSQNAAAGNVGESTNANSAAQAGGMAVSSTGKAYYNPGKERSKIQKKVKKAEEDLAVKEAKLDELKAELMKPEYQSSYSKLTEIQNEIDALEEEILIDMEAWEELSSQLEALGMYQEISKLLMYGDLSQDEILYKLGQLFEQFEVGEYNKTELVRDINTQVKRILKVATDYGFDDNLWHNYLTFFLMMSENPFSITCEKVGASDGSVNGLVANDFRIFKKLFDYDFKPIESALGIDCFTQISNYKAIVKKDLMYNHNVSEKVRALSKKLEAAKDEQEFFDVVTGFYKAYGVGMFGLNKAFRIEEHLDGGFSFMPINNMDAVMLDDLIGYEIQKKKLTDNTEAFVQGKKANNVLLFGDSGTGKSTSIKAIVNQYYDDGLRMIEIYKHQFKYLSKIIAAIKNRNYRFIIYMDDLSFEEHEIEYKFLKAVIEGGVETKPDNILIYATSNRRHLIKETWNDRNDQDNSNDKHHSDTVEEKLSLVNRFGVTISYSKPSQKEFFNIVTELARKSGCTLSDEELCREANKWELSHGGISGRTATQFVNYIMANNMKKKINYYLVATALFVAIATMVSMTVINYYLFQKQVKEDLQVMAETIESTGILKQDINEIPQIDVEGIRVTWIDKDGTVLYDNQNDVKKLENHGDRPEVESAFDKGTGDSVRTSATMNSNTFYHAIKLNDGTVLRVSIAARSIWNMFASSIPAMLIVTVIIVGICVVLAKSLTRKLMKPIETLAGNLEQASVIQKKTEYKELVPFMNAIRIQHEGVLAAAKSRQDFTANVSHELKTPLTAISGYAELIENGMVEKEQQIHFATEIRRNAQRLLSLINDIIKLSELDSSEAQQGFEQLDLYGLVKDCMENLQVNAEQRKVALNFDGTDCMVRGNRQLLTELVENLCQNAIRYNNEGGTVNVTVHKLGGKTVLTVEDNGIGIPKDQQERVFERFYRVDKSRSKETGGTGLGLAIVKHIVELHDAGLTLDSEVGRGTTIKVEFMALIYIVEDDESIREIETIALKNSNYIVSAFENAKEFYKKLDELVPDLILLDVMLPDESGYDIVRKLRKRPATQDIPIIMVTAKTTEMDMIKGLDGGADDYIKKPFSIMELITRVKALLRRTAKEEPKLLKLDDLVIDHERHVVTVNNEPVDLTYKEYELLRLLMGSQGIVMTREVIMRSVWDTDFEGETRTVDMHIKTLRHKLGDYGSRIKTVRNVGYVIEMRSKFDEQLKKLNEEMMHMGSMIEESIQKAIEAFIHQDADSAKAIMEGDSDIDREQKKIESLCFNLLMQQQPVARDLRTISAAMKMVTDMERIGDHAADISEMTILMSSDKPYRVNIEHVKSMASETMLMLIRAIEAYVEKNNDKAHVVMKQDDVVDELFDKVKAELIDFIREHPEDGEQAEDLLMVAKYFERIGDHATNIAEWVEFALDDKVRKSMEKKIKIQVRDLNLYYGQNHALHGVNMDIKENSVTALIGPSGCGKSTFLKCINRMNDLVDNVRIEGSIEIDGENIYAPSVDTTVLRKKVGMVFQQPNPFPMSIYDNIAYGPRVHGIKDKKILDQIVEESLQGAAIFNEVKDRLKKSAMGLSGGQQQRLCIARALAVQPEVLLMDEPTSALDPISTSKIEELMEDLKKKYTVVVVTHNMQQAVRVSDDTAFFLVGDMVEFGDTKTIFSYPQDKRTEDYITGRFGMLCKMLYQMYVKSMSNFYTHKLFALFVFIICIHYLYALMLTYDLTKTDGPLYKCLYECIKNDISQGKLSSGEKMPSKRTLAKNLGVSTITVENAYDQLIGEGYMFARPKKGYFIADVSDIRVIKAPVQKELSIKLPPEQDESIFDFSSNRTDSGNFPFSIWAKLMRETISLREQELLSVSPCGGVRELREAIASHLSSFRGMNVDPDQIIVGAGTEYLYGLLVKLLGTDKVYCVEDPGYKKISQIYECNNAKCLPVQMDEQGISVELIKKANAQIAHISPTHHFPTGITMPVNRRYELLAWANESSDRYIIEDDYDSEFRMNGHPIPPILSIDACEKVIYINTFSKSLTSTIRISYMVLPEHLANEFYRRLSFYSCTVSTFEQYTLARFISEGYFEKHINRMRLHYGRKRQSVLSSIKGCFTEKECRVIENDSGLHFIIQFDTNLPDKTVEELLLKKGIKLQAITHFNLSKPKEDRHQFIINYSNIDADRIMDELLIIKDTILMENNKNTQYELNKGLAQMLKGGVIMDVTTPEQARIAEAAGACAVMALERIPADIRAAGGVSRMSDPKMIKGIQEAVSIPVMAKCRIGHFVEAQILEAIEIDYIDESEVLSPADDVYHINKRDFKVPFVCGARDLGEALRRINEGASMIRTKGEPGTGDIVQAVRHMRKMNSEIAKLTSMREDELFEAAKNLQVPFELVKFVHDNGKLPVVNFAAGGVATPADAALMMQLGAEGVFVGSGIFKSGDPAKRAAAIVKAVTNFTDAKLIAELSEDLGEAMVGINESEIKIIMEERGKMKSGLKIGVLAVQGAFIEHKRMLESLGCECVELRQKSDICDLDGLVLPGGESTVQGKLLRELDMFDELKERIANGLPVLATCAGLILLASHISNDDNVYFGTLPVTVKRNAYGRQLGSFEATARFDNSFDFTMTFIRAPYVEAIDDSAKNDVHVLAEYDGKIVGVQYKNQIGLAFHPELDDDTRIHERFLEMIMKILISREQLELLLEKKRDFIGKKITIDTIIAGISFLISVWTANYETIWIIPGIVFKTIFCVIGIVYMIKIIYDIIDFKNNNYTHTDLLRDIEGLDMIQHNHSLIIIKNSATGIKTKYLTYYDERWDCKLFPNLKTADKDNESFIISNLSNDLGIPKKEIKCKYISSRVQEKYSVSHNENRVYNHRLYEVEFKNIPKIMNKNDFSINSRHYYWMTISEMEKDDNIMKKNMEVVDFVKECEKMKKISRNLWLKLAAFIVCSVMAAGLVVTTLVAVYTNNYESTAQLRDEIHANIAGAYSRQMVYNYESGDDNAFSQMMDDTNLQAAVVKSNETSEDKVDVKSDAAKVYSSVDEISNPDYIFSYKAKNLKWNRLSYLWDAMSGSYEESDDASNNMNSERISSIMYSKTNGLFYLCLNDGTAYVIPKVRVMTGSNDNSSLGLYKAVEKTDENGNNYFAYEEMFTGQSLDITGFAEWKNVKCYDEKGNHIKCGMNLSDDGDSRFDSDGSYYDYDEDIYYDSYEIIKVVEQVNESYELLPDTFNISDTGIVYYPYTQTEDKPEYYYVYAKLPQQLQEKGDYFNQADSLLDVMEFTEAHLSVLFVIFILGFVITAGYLLTVAGKREDSEEIKLRLYDRLPYAVMLGVTMFADFMVFPAGFLLIKQLPVVALICLAATMVSLEAILTTYVRIRAHEFWKHTLCYYVVRFFLKPVKKLCRMVFAPIRYGFSWIERNVPLFLISMLAFGFICLLELIGFGIGSIGFIFIIKLIELALLIAFIMQYDRIRCAAKAIANGDFSQPVDTSRLMLFFRKHGEDLNNVSNGIEAAVSEKMKSERFRTELITNVSHDIKTPLTSIINYVDLLQKEDIDNEKVREYLDVLDRQSSRLKKLIQDLLEASKASTGSINVELEELDAAVMLSQVAGEYEEKFKKNNLDLIIKNDVTPVMIQADGRHLWRVFDNLMNNINKYAQPGTRVYIDIIPKDRGAIITFKNVSATPLNISSDELKERFVRGDSSRNTEGSGLGLSIAESLMKLMNGTLELTVDGDLFKVTLEFMYKVLVCDDEKDIVSAISIYLTSDGYEVIPARNGLEALDIVKHNDVHLVLMDIMMPVMDGIEAMVEIRKISNVPVILLTAKSEDTDKVLGLTVGADDYVTKPFNPVELQARVKSQIRRYMLLGAGNTSAGKLVIGGIELDDKSKTVTVDGEAANLTRTEYDILKLLMEHPGEVYSPNQIYAKVWKDEPYGTENTVAVHIRHLREKVEINPAEPRYLKVIWGRGYKIDAEMTSINGKRRRIGDDVVYFFIYLCAALSVVLLAGIIIYVFVRGIGQVNWQFLTSETSVLRGTVGIAGNLLNTLYIIIITMLIATPVGVGAAVYLNEYAKPGKLVSTIEFATETLAGIPSIIFGLFGMMFFGQTIGFGYSILTGSLTLTLMVLPLITRNTQEALKTVPDSYRHGAVGLGAGKWHTIRTILLPSAMPGIITGVILAIGRIVGESAALLFTAGSAGMLPKVASGYFSKIMQSGGTLTIKLYLAATSEGKFDQAFGIAVVLLVIVFLINILTKVLAKKFQAKMKHKSIVENVAKIIFTVCAVVAIFAVLSITIYMFLKGAPAFFKVGVLNLLFGTKWAPTAADPSYGILYIILTSILGTAVSILIGVPIALLTAVFLTEVSNKKLSAVVQPAVELLAAIPSVIYGLLGLMILNPVLYKLEKHIFANSATHQFTGGSNLLAAIIVLAIMILPTVINMSVSSIQAVPQQMRAASLALGATKIQTIFKVTVPAAKSGIMTGIVLGIGRALGEAMAINMVAGGTVSFPLPFNSVRFLTTQLVSEMGYASGLHRQVLFSVGLVLFVFIMIINLTLMKLKKKGAVENDMKEEIKMKNRMKRLLVLATAATMMTAAFTGCGSSSDGADNNADTSADEGTSNENLSGSLSLAGSTSMEKLCEALKESFMEKNPGVTVTVEYTGSGSGIESVSAGSVDIGDSSRALTDDEKANGVEENIVAIDGIAVITDKDNSVTELTSDDLKKIYTGEISNWKDLGGKDEAIVAIGREAASGTRGAFEELLDVKDQCKYAQELDSTGAVLAKVGSTPGAIGYVSLDVLDDTVTAMKIDGVEATEENIVAGKYLLSRPFVMATKGKIDEQNDIVKAWFDYVNSDEGQAVIKKVGLILPQMLKKLRRKFIAIAMLSVSIVLIAIVGMINIANYISTNEALDARLKLIAGNGGTFPDLLEQKNMGVGSNKKNDENTNTGTESTSTDTENANTDTFGNTADESTNKETPTLKEPPSGRTDVQPPEDMNLMEGEILEIQERLETITEEGTIYPTQKDGNVKWYVWKNGRREYLSKKNDKEIRNLVNKKYLELYLKDTINELRLLETNRKARKKYKTDYAQKMLKQKHYRSILLPVDKKENEETNEKTQVPNPEALKFYTKMGIIVRSKSEVIIATALYDNNIKFEYEKAIKISDVIYYPDFTVEKKNGDIILWEHLGLIDNPDYRNKAYRKILKYNENGYYQGKNLILTYETAESPLDPLDVEHEIEKMCRMFDSTIILGAVLEISAVSATFSRNFSGFWAEPMAIVHYDNMTNQTNNINQTNNINNTNHINHTNHINQTNHTNHINHINKTAIITGASRGIGAAIAKKLASCGYNLSLCCRNSSDRLKALADELHCAYGIEVLCYTGNVGDFFFAKDMVANTISHFGHIDVLINNAGISHIGLLSDMTPEEWNNIVAINLTGVFNFTKLVIPYMVADKCGRILQISSVWGNVGASCEVAYSACKGGINAFTKALGKELAPSHIPVNAIACGVIDTDMNRCFDETERAELADEIPAGRFATACEVADMAYSVITAPDYLTGQIITFDGGWIMPDRLDYLMRLNNLTNIALSEIMCCAESTISGYRTGRRVPDIFVICHLSTIFGVTPNYFLGFTDEICPTHNMRGKIAFDPHIIYIVKNNPAHIVICAPGCFSLQFWLRLMYMWRERSKEEKHEDVVNTGLLPLDVVEGFKIRPGFFRMYGACVASNGVSFTINSHGATRCTLLLFKPQAPKPYARIPFPDSYRIGDTYSMLVYDIKPDEFEYAFSFDGPYEPAKGLLFNEENVLLDPYSRAVTGQRKWGEKPEGGKDFEYRARVVKSSFDWGNIKQLEQPFEDLVIYEIHVRGYTKDKSSGVSAPGTFAGLKDKIPYLKDLGINAVELMPIFEFDEMESARVVDGVQLYNYWGYNTVSFFAPNTSYAFNEEHNHEGDELKSLIKALKENGIAVILDVVFNHTAEGNEMGPCFSFKGIDNNVYYMLTPDAHYYNFSGCGNVMNCNHPVVRNFIIDCLRHWAIEYRVDGFRFDLASILGRDQNGAPMANPPILESLAFDPVLGKMKLIAEAWDAGGLYQVGSFPSWNRWAEWNGRYRDDMRSFLKGDDGMAGNAITRITGSRDLYSPESRGHKASVNFLTCHDGFTLYDLYSYNEKHNEKNGWNNTDGDNNGHSWNCGAEGETDDPNVNGLRRRLIKNAFAALLCSRGPAMFFAGDEFCNTQFGNNNAYCQDNIISWLDWSRLEEFKEIHDFVRHMIQFRKEHPILRKMTKPSSCQFPEISVHNGTPFNASTDYKTKLIGIMYAGRNEEDTEDDIVFYCMNAYWEPLVMQLPVLPNGKHWHVDTNTNAEYFDGEDFTEKTELLGVNTIRVPARTTIILVAEMKNKGLKILLSVLLVLCIIMAGALIGKEYIADNIKEAANQNGVDVVKDTSDTGKEDENAVDSMAEGTANTQSDAAKAEATEADTQQPQMSTIVITATGDCTLGNNQEQSYDGSFNSYYDSKGQDYFFGGVRDIFEADDMTLINLECVLSDATERVEKRWNLKGKPSYIGIMTGSSIEACSLGNNHTYDYGQQGLDDTRNVLDDAGIVYGFNDHTGIYETSDGTRIGIVSVSLLSQNGDREAYIQNGIAQLREQGAAIVIACCHWGIEGDHYPNDYQKASAHRIIDWGADLVVGNHPHVLQGMEVYNGKMICYSLGNFCFGGNKNPADKNTAIYQQAFTLINGELQPGIDARIIPCTLSSVSSYNDFRPTVASGEKAQEICNLMNTYSQNCSNIEIDELGNLHVNMTELEEYYNKFNEEKRLNSRHGRVEFITSMKYIHDCLGSLMNEKQLDLRSQIKILDVGAGTGRYSVPLAEEGYDVTALELVKHNLGRLKQKSDKVKAYQGNATKLKKFGNDEFDLTLVFGPMYHLKSAEEKLAALNEAKRVTKPGGYILVAYIMNEYSVITYAIKEKHIKEGIEGGMLDESFHCTEKANDLYSFVRLEDIEALNAQAALTREKIIAADGAANYIRPFLNALDEEEFDMFVQYHLSTCERADLMGASAHTVDILRVMSEKINEQIECCDCNEIHEDLLKIVNDTMPEETELYDLAELFKVFGDSTRIRILFVLFEAEVCVCDLAKVLNMTQSAISHQLRILKANKLVNSRREGKSVFYSLADGHVRTIIAQGREHIEEMNKKQKKVLVRIIIAAVLMIILHFIPVKGIIRFLLYMVPYLVIGYDILKKAFKGIKNKQVFDENFLMAVATVGAIAVALYENGDYTEAIAVMLFYQIGELFQSYAVGKSRKNISELMDIRPDYANIEVDGKLTQVDPDEVAIGSVIVVQPGEKVPIDGVIVEGSSTLNTSALTGESVPRDAKCGDEIISGCINMSGVLKIKTTKEFGESTVSKILNLVENSSSKKSKSENFISKFAKYYTPAVCYSALALAILPPLFRILFMSAEPQWGSWIYRALTFLVISCPCALVISIPLSFFAGIGGASREGVLVKGSNYLETLSQTRYVVFDKTGTMTEGVFEVAGVYDNTLDREKVLEYAALAESSSSHPISRSLQKAYGKEIDRTRVTDVEEISGHGITAKVDGVSVAAGNYKLMKKLGLSYSETDKVGTIVHIAIDGSYEGYILISDKIKPTSAAAIKALKKAGIKGTIMLTGDSRTVADSVAAELGIDEVYSELLPGDKVAKVEELLARKGSKEKLAFVGDGINDAPVLSRADIGIAMGAMGSDAAIEAADIVLMDDDPLKIAKAIKISRKCLRIVYENTYFAIGIKLICLVLGAVGIANMWLAIFADVGVMVIAVLNAIRALFVHKLMKKTYKIDVDCANCANKMEDAAKNTAGVKDATVNFMTLKMSVEFEEGQDAKAVMQEVLKNCKKVEDDCEIFLMYTVTHIYEADFGCEERADGAKAKCVVYLEDENGRQRHVEVEDEWLTANGIEEGSSWKENITDEAMNIVCLDLEGVLVPEIWIAFAKETGIPELEKTTRDEPDYDKLMNYRINILKEHGLGLKEIQETIAKIDPMPGAKEFLDELRSITQVIIISDTFSQFAGPLMKKLGWPTIFCNELEVAEDGEITGFRMRCEQSKLTTVKALQSIGYDTIASGDSHNDLGMIQASKAGFLFRSTDAIKKDYPELPAYETYDELLAAIKAALMQENEKDKRLEKQLDFIREIDKEKEIFRQTYLADASRKENDAEHAWHMAIMTMLLSEYANEKIDVLKTVGMLLIHDIVEIDAGDTYAYDEAGKATQHEREQKAAERIYGLLPKEQGEPLLKLWEEFEAQQTPEARFARTMDNIQPMLLNDASDGLSWREHSVKLSQILGRNKRTALGSEKIWDYAFNNILKKHVDSGNIIDDEGVFSAEAGACAKANERNGRMSKIRSAFENGKAFIPFITCGDPNLETTAKIVREAVANGADLIELGIPFSDPTAEGPVIQGANIKALAAGVTTDKVFDLVKDLREDVTIPMVFMTYANVVYSYGAEKFISTCKEIGIDGLILPDIPYEEKEEFLPLCEKYDVDLISFIAPTSKDRIAMIAKEATGFIYVISSLGVTGTRSEIKTDLASIVKVIRENTDVPCAIGFGISTPKQAKKMADISDGAIVGSAIIKIIDEYGEASPKYVGEYVKAMKDALMTNPNGRFGIHGGQYIPETLMNAVKELEEAYNYYKNDPEFNRELTELLNDYAGRPSRLYYAEKMTKDLGGAKIYLKREDLNHTGAHKINNVLGQALLAKKMGKTRLIAETGAGQHGVATATAAALMGMECVVFMGEEDTKRQALNVYRMRLLGAEVIPVTSGTATLKDAVSEAMREWTKRISDTHYCLGSVMGPHPFPTIVRDFQAVISKEIKEQMLEKEHRLPDAVIACVGGGSNAIGSFYNFIEDEGVELIGCEAAGRGIDTFETAATVNTGRLGIFHGMKSYFCQDKYGQIAPVYSISAGLDYPGVGPEHAYLHDIGRAKYVPVTDDEAVNAFEYLAKTEGIIPAIESSHAVAYAMKLAPTMDKDKIIVVTVSGRGDKDCAAIARYRGENIYEMNILDQLAEYSRFRVADDKKKISLEEMKNIAIQTKNEKLCDFAFEKALKKDGLSFICECKKASPSKGLIEPDFRYLEIAREYEAAGADCISVLTEPKWFLGSDEYLKEIAKTVSIPCIRKDFTVDEYQIYQAKTLGAAAVLLICSILSEVQLGEYIKICDSLGISALVEIHDEKEAGMAVRAGARIIGVNNRNLKDFTVDTANSRKLRDLIPDDIIFVSESGVKSTDDIRAICEIGADAVLIGETLMRADDKKAKLDELRLSMIKEAIVKIVNKEDLTYDEAYAVMNEIMGGETTSTQNAAFLAALSTKSAKAETTDEIAGCAAAMREHAVQVKTGMDVFEIVGTGGDNAQSFNISTTSALVAAAGGMKVAKHGNRAASSLCGTADCLEALGVNIDQSPEKCVELLNKVGMCFFFAQKYHTSMKYVGPIRKELGFRTVFNILGPLTNPGSPAMQLLGVYDEYLVEPLAQVLVSLGVKRGMVVYGMDKLDEISMSAPTKICEIKDGWFRTTVISPEDFGFERCTKENLKGGTPEENAKIVRDILGGQKGHKRNAVLMNAGASLYIGGKADSMKEGIELAAKIIDSGKALETLDKLIEVSNSMILLIDNYDSFSYNLYQLIGEIEPDIRVIRNDEMTVEDIRALKPDRIILSPGPGRPEDAGVIIAVAKELGKEIPILGVCLGHQAICAAYGATVTYAKELMHGKQSDASFDTESLLFKGCPKKAKVARYHSLAADADTMPDCLKITATTDDGEIMAVEHKEYPIYGVQFHPESIMTPDGKQMLSNFIKAMKISPTLTEVKEIAKTGKYDILPVSCEILSDFITPIEAMRILQNVSTHCYLLESAQANEAWGRYTFLGYDPKLEINCIDGHMKLGKLSVETENPSEYIRQILSEYKSPKFDYLPSFTGGLVGYFSYDYLGYKEKSIRGKARDTEDFKDVDLMLFDKVIAFDNLCQKIILIANMSLDAPETGYNKAIVELKQLRELLMHGEKKQNMGGKLLGEVTPLFDKEQYCEMVEKAKHHIKEGDIFQIVLSNRLSAPFEGSLFDTYRVLRTINPSPYMFYFSGTDVEVAGASPETLVKLENGVLHTFPLAGTRPRGATAEEDKKLEEGLLKDEKELAEHNMLVDLGRNDLGKVSRFGTVKVEKLHSIERYSHVMHIGSTVRGEIREEYDALDAIEAVLPAGTLSGAPKIRACQLIGELEDNKRGIYGGAIGYIDFTGNMDTCIAIRIAYKKNGKVFVRSGAGIVADSDPEKEFQECINKAKASLKALEVSQEVEEMGEYVLCRMQLNMVFENNKMYIIRKTGQKYVDKHKQEMHIFDYSFLDEGLLPAEIVNLTATITAFNAISDTRKESNKSIYTELEKIARVQSVKGSNAIEGIVTTDARIKQIVDGDSAPLNHDEREIAGYRDALDEIHSKHDQMSFSENMILHIHETMTNLAGYELSGKYKTEDNLIMEIDERGRRRVRFTPVSAADTGEAMQQLVLAYMDARDNPKINKLLLIPCVILDFLCIHPFSDGNGRVSRLLSLFLLYKSGYDVGKYVSFEEQINDSKDFYYEALQESSIGWHTNENSYFEYMKNFLSMLYKCYKELDKRFSTVNGKKLKKTERVEQTVLNSVLPVSKAEICDILPDVSPSTVEAVLGKMVKTGSVMKLGQARATKYVNAKYIKMNIRRAHEKDIPRLIELLEQVLQIHADIRPDIFIPGTTKYTNEELAEMIKDDTKPIYVAADDDDVCMGYAFCQVRQQPFSNNMVPFTSLFIDDLCVDAKTRGAHIGEQLFEYVKNEAKNLGCYEVTLNVWSGNTSAEKFYEKMGLKTKERQMEYILMKAYYHLPGLFEFYELYKEFLPLYRKHREYFYDWCDIGSIYGAPADCIWGGGRVGFGEHDLKEVLKLMQEYGISARLTFSNSLLTKEHLLDKKCNELCRIFDIGRDNERSRGFGNGIIIYSDILLDYIKENYLDFYFISSTTKVLTDFCEFENELNREDFRYVVPDFRLNKSFDKLKALSQHQKEKVEFLCNECCWFGCTDRKKCYETVSRKNLGEDCPEHYCTAPDAGQGYLFSKAMENPGFIGIDDIKNTYLPMGFSNFKMEGRGLGSAMILEFLLYYMTKPQYQIHVREHIYLDNMLDLFMVKLDNVTEGVLDVINDNKFSQTGAFNLRENGTSICHGDSEHIKIKKKTDKPGIDIYIDGKTDGEAVYIPVVLSKSGMTDLVYNDFYVEDGADVRIVAGCGIHNSGCNESRHDGIHTFHVGKNANVRYEEKHYGEGNGTGARVLNPVTNIFVGENSVFTLDTAQIKGVDSTVRETNVELGKDAKLYVTERLMTDGEQKAESNIEVQLNGEDSSAQIVSRSVGKGNSVQTFHPNAIGNSKCQAHIQCDSIIMDHAEVGSIPEIRAKNIDAAIIHEAAIGRINDEQLLKLRTLGLTEEEAEEVIIQNFLNMILCCIINKNEVKIVLKAENLTLNVDDEGGKKCLLNNISFQVEDGEMLVITGPNGGGKSTLAKSLIGIQTPDSGKIILDGQDITELDINHRANAGIGFAFQQPPRFKGMTVMKLLKLAAKDELSDKECCDLLTAVGLCAKDYIYRQIDGTLSGGEMKRIEIASVLAKEHSLCIFDEPEAGIDLWSFSMLIQKFEEIHTEKKQSLIVISHQEKIINMADRIMIIDGGEIKKIGTKDEVLPYLNGVQKCHKCVERLEGRAMIIKDIEFKLKDGRNAILRSANEKDAKALIEYMKKSTGETDFLLRTPEECETRTIEQEIDFINSCNLSDTHTLLVCEADGKIAGNCMVWWNKRAKTGHRANVAIGLLSEFWNQGIGTRMFREMIKIAESNPNILQMELDFIEGNSRARALYEKMGFRITGIKFNSIRQNDGTLCNEYSMIREISRMPKNRLQETVFTIMMVLVMVYAMICYNIALETGGMKNFVFKAALGEFPIMIVAGFILDTFIAGPLAKKCAFKIVTPGKDRPIAIILAISVFSIWFMCPMMSFIATILFNGGFNSQIFATFCELVVRNFPMAFFWQLFVAGPLVRFIFGKIFRENMVKKINSSEFEQVKNNKAIIVDFSAEWCGPCKMLAPVMEQLSDEITDVEFYNIDVDENPDLAREYRIMNIPAVIAIKGGQVAGQQIGLVSKDDMKGFIDGVFMDFESRRQRILDKMEDNSIAILYSGIEHHVSADEYDLFTAQANRNFFYLTGLRRDNMVLVLDKCVEPAKTMLFIEEADPTMERWYGRKVTMEEAEEVSGIDEIEYIYELESTLDRIMTREDVYTAYFDTYRHQKVDLPDYNVVKANEFKSDYPGVAVKNLFPLVAEERMQKDEDEIELTKKAIALTKDGLCNVMANLKPGMKEYQAQADFEYIIRRGGAEWTAFPTIAGSGMNGTMLHYDTNRETMEDGTLVLLDLGARIDGYNSDITRTYPVNGRFTERQKQVYDIVLAANRKIVEVAKPGMTTKELNEVCKDVLADGLMKLGLIKNSVEISKYYMHGVSHHLGIDVHDVTVDSNSRLRPGAIISDEPGLYIDEWEIGIRIEDDVLITEDGAVCLSEDIIRTTEDIEAYMAEHKKNMTTVSTKSGRIIKVVSREEEKSTLTESDNEMDERAVEAVKAAINKAKICKKPIAGYDNEKKQAYVEYANGKRKYVNIENLMLYYLGRGTEFKKEDCKEYKTIEGAMRAAAKDENLVVWDENGNIIGSLTDNVPEGALQTNPDGSVNAYDEDGNKIGTVDAETVEKMTTFENGEDAAGQQEDTESGENASNDAEMTNPPDEPETGENGANTEPQEAEDKVIIPQGKMKVTVICDGSLNIRRSAAWGNENICGRAIRGQSYYVKEIHVVDGKKMVRTIGDLYLSGESEHVQFEQLMISNCGHDENNRYSGGKAGDQTGTEWQVINWYNRPWKCVLRHPDAKVRKMIASMAKAAAVNNKIGYDQSERYTFWEHLKASNYDPAQITIACEADCSSGVAAIVKAAGYRLGNEKMKNVSIYLYTGNMRAGLKAAGFEVLTDSKYLTSDAYLLEGDILLNDNAHVATNLTDGAKSSGAGASNTTPVKNDTKTDVAYGFDKKLAGEYKVTASALNLRAGAGTGKTILAVMNNGEKVHCYGYYNDCNGVKWLYVVYKNIVGYASSRYLNKMLVLIYAIMAVVVFAAVNIFFWKISFDLDKEMREEMRECGDCHIDTDETRFGKAVTRVCGFILSIPAALMWWATPLIVGGLMLYDKIQEKNPELCGFTADEFDKEENKMKYIVENWFVIVGLIAVLAAGGYAVYVFVKMPSDKQLNKAREWLLYAVTKAEKELGGGTGQIKLRYVYDMFVARFAWLARVISFEAFSMMVDEALERMKKMLESNKAMQELVNGEAGEVGEKDMMRMTEQERRIRIRHLKRMYRIRERKERHDKKVSGLFMKRVVFTMILAAFIFTVVMIFVFLRVGSEPSTLIENVFRFLSVEGGAMALIKSVKTVKGTKSNGGIQHNDEPEQNDEEAQGMTIEISLLLSGVSVAFAIFFGICSKQRNEKKDTQEDAEQRATTDTMVMVKLENIADDLKDIKRESKENREEMKQLRERVVIVEQSLKSCHKRLDGERNSDRMSPLEIISRLCDVTENLSSIVKKQQTIIEQSKIEEAVKAELRQDIKETDREMDVLEYGMRRYCDTDDIEATEFGKENAVDDMRILVESLKRMYAVKKTLTKEQIAERVARGSISAEEYEYITGEEYSGGDAEMEKEVEGADGKMQTVTEWQYDEKEMTVEEYENMALMKSVVEENTSGIVESVTQFQKDAVIDEYTAQLIEEGLIMRSYNNLYEPMLQDDYIKQRFTNASKKKKNRNDVREVLENLDEHTELLKKMLTEELFIPDYHKPSIINESSSKKTRRILKPHYKYEQVIHHCAIGQFKPIVMNGLYEFSCGSIPGRGVHYGKKYMRKWLDSYDGKKFFVLKMDVHHFFESINRRILKRKLKEVIRDKRFYRLLCILIEHDKIALVAKILTDAGVEIDAEQTKTFVGCIAFDDISGALEILQEIGITGAMFDELKEIIEEMRKGVPLGYFTSQWFGNFYLKALDHYIKEELRAEHYMRYMDDMVILGKSKKKLHKIHAAIETYLNDNLDLEIKGDWQVFRFEYPVFDKGGNPVLDKDGKQVTKGRMLDFMGFQFHHDRTTIRKSNIEAARRKANHISKQDKISWYNASVMLSYMGLFKHTDTYNYYVEYIKPKINVKKLKRIVSKHSRKENEKHDRLEKGDRNTAGTSGGDRPDIVSVNGLSAMASGDVIVKVADKETLDRTYANTNAILAAVGEDVRAKGVKRYGLKINKNDSNPATRCTYLFDAAGMTPAAMNYSTGAFDFGDWGDVFFVKNNYPAMVRYDGTEDYKLDPNDHTKKADGTTASDVANTAYGGNAMSVFDGSGDKGKIWLSQFEIGNYEYMIISNVQYDESYNDDAYVREDGSHADKLYYPMFGGSYDGTRIRSLAGQTLMYNTNASTEITRAKANGNGWNIGSWSKRNLLDCMLKIMSKTDNSQTAFGQGQTSGYVNDASQNYGHLATGTLTNKGQFFGYKDTTHEVKVFYIEKWWGNRWDRINGLLMVGGEILAKMTPPYNLTGKDFEKVGITFASSGNGWQKGTKSSRFGRIVNSIGGSSSTYTCDYFWWNAGITAVALVGGSCSNGGSCGADYLYLAYSAGVAIWGFGASVFLEQPIAAMTYKKVTPISKGVLRIRSEPDESGRVCGSVSYGEEVTVETTKVTSKKGKEYYRLAGYGYILASQVRDAESQTEAEAKVDAAVKKAESAASKAEQAAKACDGIAAGMNVVIDSVTGKACEIGMTDGNIVVREAMAAIRPCTGTTADWKAVEDTLILKEREVGVEIDTSGHYLVRQGDGKNKFFDLPIIVNNARYEEILELTQGYMNTVNNFSKNMTEATNSANSAAKTASDAAASATAGAKACEGIADGLNTMVDTVTKKTCVLSIEDGILTIREAMAALTKLITYINLEMSGDTKRYLVSAKQGDKATRFIIAKLLNNGEPYTIPTGSRTVINITKPDGKHVYNTCTYSGSDVTVELTNQALAASGTAYCDIEIRTSDDSQIITSASFTMEIEKSQRNENAILSSNEFTDLENRIKGHIENIDNTDAAVKKAESARVTAENARVKAESERAAAEKTRQENENTRIQQEKQRQQDTSQAVKNAEDATTATKQATKDCKEATDRAEDALQNQEQLEATLNTATQIRQEVSQMQSAVEAAKKQVEQDKKDIDDTIQNSLLASAEKILESVQDYFNRAEALYSSMYLDCDGETPYLRTVTPIFIDGATPQVRRANEGVDFDGGTPTSRQLAVMRRVITGFNATNAAQGQRLGFTYTEMTDSGKTTSDNNKGSMTVLSEEAQSHIDWLKKFINDWIEEQGEMQIFNDRKKRIGTLSGFKNRAITTTLDSGDKEMTFAYPASGALVGLLQEEYYIRTKTDEFVIKAVEKGEQFNKYTVVLNVEELEGTAFPYGFESDEQTIRACLEFAFEGTGWHVGTCTVTKKRTIDEQENITAWDVLQKCLSTYRCECIIDSINKTVNIYERIGSDKGCYFIEGINLRKISLKSDTYDFYTRIYPIGKDGITPEWLTGKDYIDNFQYSSKVKAYVWKDERYTNTTSLIEDATAKIEEMSRPYKAYTAEVVDLAKASEEYKDILSYGIGDTVTLVSKKTRTKEKQRIVKITEYPETPKKNTVEISNARKTFADIQKEATAAATEEAISIANSNTKKVLKDGYYTKSDVESHITAAKDEISLSVSQVYETKKIVSEKVAAAEKNANAATDEKLTEYSTTEEMKSAIDMKADEINLGVSKTYETKTSVTEKITAANKTAQDAANAAEKNANAATDEKLTEYSTTEEMNAAIKVKADAIESTVSKKVGSNEIISKINQSAERVSIKASKISLNGAVTANSNFKINTDGSAETKALKITGGSLLIGGNCEITNVGNVFALSPNFYSGLYINSDFKIGTLSQLNYSMLLGYVGKHIFVGESGGTLWGYGFTANNNIFAYGTIGCMGEKTRIIHTDDGRNIEMYAYETASPTFGDMGTGKLDEDGQCYVYLGDDFLLTVERDMKYIVMLTAKGAGELYVESTNEKDGYFVVKGTPKLEFYWEVKTRQKGSRDTRIEQSDIPEKEDITAEEQEMLNEQMRNQMMLLYEMEKDEIEVQEEQNRIIERMEESEMKINGIDIRKYDAKQLTADVQPPSFSNSYEWLTGAALPTEFETEVQMGHLKLSIYFKGKNRNNIIRAASEFMMNFTKACKLELDGYKGTYIGFITSNDYEKKNVKERYVVNIEFDGFFVDDDLSIVFDGKTSASFYKVGTRDAPCVVEVYAKKALTNYTIGGLGDDDIIVESLAAGKKVVIDAKTGLVTIDGANAFDKVDLWAFPVLKSGETALTFSDTNARVTIKYTPMWIMAYTSVKISANSSDYQSQMKSAAAQMKVLSAEYTTAATKAKLFGSETDSLKAKAESLTQKITVQKGIVQLNSEQQEKLTKKLSEQKTKQEELKSKIDAAKDAYAKSTEETGKNSEQSKALKEELDKLEQEYKANETAIGKTETALANQTAKTEKSKTALMNMEAELKDVNEQLKNHKLETFAKACETAGEKMESFGKKMSVVSTGLTTFATASGKMAIDFEDDIAKVSTIMDDSVMSVDDMSDAILSLSNETGIAAGDIADNVYNAISAGQKTGDAVNFVRESTKLATAGFAESGNTLDVLTTILNAYGLEATEVTNVSDMLIQTQNLGKTTVAELSSAMGKVIPTANANSVALDQLCTGYAIMTANGVATAESTTYMNSMLNELGKTGSTTDTILREKTGKSFGELMSSGSSLADVLSIINDAAKEQNLSMGDMFSSSEAAKAGLILLGDGADSFNGTLQEMRNSTGATDTAFSKMKTTSYDIKIALNELKNTTLQFGQTVMSSAAPIVKEFTEKVHLLSEWFGHLDESQQQTILKVGLVVAAIGPLSIGFGKVAKGISSTITTGQKFVSGAAKIIAKITAKTAATAAGTAADTAGTAATAAHTAATTAATATTGGMTAAQTALNAAMKLCPIIMIVALIGGLIAAGVALYKNWDTVKEKLSELWSNIKEKFEAIKETITGAFTKAKEAVTEKVKEIGDNIKNSTIGQEATKVFSSVKDTVHNFMSAATETAKEKLGNMKTAYEENGGGIKGVVAAGWEGIKGYYSAGFTFVDDLSGGKLSEIKTKFSEKASEIKEKVSDGWENMKTTVTTKMTEWKTNASNKLQEIKTGFSEKVSSIKENVSSGWENMKTTVTTKMTEWKNNATNKLNEIKTGFSTKVSEIKTNVSSGWENMKTTVTTKMTEWKNNATNKLNEIKTGFSTKVSEIKTKWSSDFTNIKDKATSLMETAKSNVSTKLNNMKTAYTNAGGGIKGIVSASFTGVKDTMNSLMSRANTLTGGKLDSIKSAFSSKLSSAKSTASSILDGIKSAFSSKMESAKSTVSNALGRIKSAFNFSWSLPRLKLPHISISGSFSISPPSVPHFGISWYKSGGIMTNPTVFGINGNNLMVGGEAGDEAILPLAEFYNKLNNILDKKLDAVQKSNIVYVTNHTYIDGDEVASRTVSKVDAQMVTDRRKGRMPEIEVTCSGKRYFINSITVEQYKKYISLMEKNHTEKISGVMFFNTKIMQELFGNELTLAEIGEIDAIDFLTAIKTVHFVMQNIIAEKLLNIVEVEQVEKEKSVFDEFDRENGYEDEPEEPEENQWKVCGEIVDRVVKIAIRLLKNSYSQCMKENIVTLLEYLRFELDTINENQMNRKIIISNKEFTMPKMSIDTYTEYLDIAEQTDAHPRYTRQDIEIMALFICKAYGDQFTVEELKNPETGLDAAGLILEFQFIDAGIGEELTKRMEKIEKNFQNGKMSETVTQVSETVQQIVRSRTCGCRDFYIAKITQNDATGYVAGTPVKLARAIKAKVDEKWTSEKIYSDDGTEEVINSYEGTEVELEVNALAPQDRQILFGQLYENGFLVKTADDKAPEVAIGWRERKLNGKYDFKWLYAGKFAEGISEEASTKEGKLSPTTKSIKGSFYERNLDNAYEISVDESNLVKENTKAADAIKNWFSKVQEKDDAAAMNSPDIIKDASDALQQISDGGIIVMQGWYDKNIHDRHVTLWDLGEDDENFSDDDAEGVTLSLQVTIFSESDEVELAREIKTLMKKNGFSFEGRNGDDSKPEDGIYMKAQRFSKFYEMEEMKIEMEFQGLQELMKAFEDAASDEDIRAVNKKIVEQGEPVVKRIMSGKIPKSADIKLSGRGFGSKSSVTSHAADSVPLGAVKVKDTGASANVGWEKSDNSEHFYVKFINWGTIYRPPQEFIYATGREADAELQKIAEQEYQSYLDNTLKMTGRIKIIRKVSSVVDGRRQQEETEFYSCWCEAKSLGTNEKYTALQTGLENTIVFETRTCDKMEEIRLNLKEFYAVYKGVEFKIYDASPMFTDDRKYQLKCRAGAMTDEEKEKYRAGLITTCKVYCHIDYDDDMEILELMFDVTMQEMTELIPNFDQYSLTSRQKLLAFISVKELYDNRDKYRSDTKLLASAASSMLLKEIYGGAAQMNKELQKLLKQINDKKNEVKSLVNDGKLDKAKAAKEELKELQNRFDLLYDLDEDEQDGIKDKVNKGTAKQVGGEKKVDKKNLVKAFVNIVKAGFLHREADEADVEVYKNALTSDTTAGSEGEVGIGVTIPEDIRTDIIELRRSSDNLEQYVNVEGVVTKTGTRNIEVDAESTPFDNVDEAADFPEMDEPEFLPIEYKVKKKGGILKMTAELLEDTAANIMAYINKWIAKKTKATRNAMILKVLNEMTKGKEVTVENLDSLKDIFNEQLDPAIAESSIVITNQSGFNYLDKLKDKDGNYILQKDPTQQTKGKMLFGEYRIVKLSKKTLKSTPIMNSDGHTIDGYKHPVFCGDLKEAITLFDRNVLTIDLNDKGAGLWDKDMTGLKVRDRFDVQAVDKDAVIKGEITEVVNGMPKKGRFDFTKKNKRSGKIENVGYLDLEQDEEQSRCSLYFYGDIVSATWESMWYEEDRCPQDIADFLNQLDGYEDIDIYFNSGGGDVFAGLAIYNQLKRYDGHKVGYVDGMAASIASVIMFACDELHFATGAQAMIHKPLCMAYGNADDFKAVIKQLNLCEDSILDVYMEHVQEGVTRDKIQSLMSNETWFDSKKMQQYFNVEIEEKAAVAACASDYFEKYNNIPETLKGTETENIVDAVLAELEKRSNAAAQAEEQRIEAEKREILDDLYLYGMMNPFQRLGVKISNWWRGEPQDSGGVVTLNSPSFLERIGLKRKGKPTSEVTYFTCLKMLSETLAKMPIKYYQKTDKGIIEAEATDASKLLSKRPNPFMTPTTFWNTVEINRNHYGNAYVYMRKKFDRKKYGGEIKIVDLWVMQSNCVQIVVDDAGIFAGVGRLWYVYTDPTSGRQYVFSTDEVMHFKTSFSFDGITGLPVQQILRDTVAGASESQAFMNNLYESGLTAKATLEYTGELNEKAKTALVKSFEEFGSGAKNTGKILPVPLGMKLTPLDIKLTDSQFFELKKYNALQIAGAFGVKPNQINDYSKSSYSNSEMQQLSFYVDTELFIIKQYEEEINFKMLPDDDSDDGYYYKFNEKVLFRTDSKTQMEYLRNGVGGMIIKPNEARRKLDMEDAEGGDVLLANGSIVPLTMAGAAYLKGESEPDETKEPEQPEEKTEPDTEQPDAATEPDETDEVEDEDEQEGGEMAKAGETQDRCTQYALDVVSGKITAGEYVRLACQRHLDDIEKSKAAPYKYYFDVEKSEEIINFAEELTIAEGEENEHVTAYPFQCFILGSLNGWRTKGKSYRRFRTSYVQLGRQNGKSFINGILACYYGNFDGYKYGKIFCTATKQDQANIVFDEVAKFINSDEDLSEWFKVHDHNHTIDCLLTHSEIKALSGDTKSLDGHRAYLGIVDEYHAHKTNQMYKLLEGGIKKLKSALISVITTAGFDLKSPCYKLYEYCCNLLKGVFENDSQFVYIAQMDEHDDRYVPENWIKANPILEFDMDALENLIPIAHTARDMGGEDLRDFLVKQLNMWMQWSNSLYIKDIAKWKACAALKSLKDFRGSKCYVGVDLSSGGDLTSIAIVIPFMVDGVKKYFVHTHSFIPSSRVDEHIKTDKVPYDVWIEKGLVTVTETLGGIKTDYKYIIKYLEDLVKEYDLKPQLICYDPHNASAFLSDLEALGFDSISVTQTAKELNDATVDFRLEILAGNVEIEGIEVGKEGNKIVVPADGLLVWSIANAKTISNNYGEIKIDKDITTERIDPIDAIIDAWKHAMKEEYRPDVNETVNEWLEQFEKYMKKGGEKMAGQRQPTDLVVMNGRKHLTKAEIEARKNAEVVAPNNKVKPPSYLTPEQKKKFRKIAKELLEIKLIANVDCDALARLLIAQDQYIEITQQIRATPLMEDVPVYETKTNPDTGEKERVQVGTRQVVNGERERLMIIQDRCMKQCRQGASDFGLTVSSRCRLVVPKPQQQKPENKFAKYANMLLKSCRCGKLIPQSMKMCEECERQQQSRHMIYNNTRRDERAAEFYISKEWRAMRERIIEVYDNIDIYALYVEHELLTCNPVHHIVELEDDWEQRLNPFNLIPLNHKTHNTITALYKQSQASMRATQKQLRSLIEYHFREAGGYKKVLCDSFLVAPPLLFGENSPREFQQKGTSERGVRMMKEEKEQTVIDKTLLYLENYREMERYIKEAVSETSQVPNISKYNISAERAFLQSVRECRAETVILFEHLKQALASLKEDAEAAGEGYKYDALEAVYIKGKTYEDIVRETGCGRNSPKKWCKVMIQRLSIKLFGAKAIENDRNGVKTGMGIMSIVKSVIEHFRKAGKTEKEISNMIEQAADKATVNKGIAEKKEYKKPEIKAKTTAEQFVEAVMQTGVTAEQVKTAIMKMSGSQGCTNRRDTNNWRKMHGLPMRRKQKARRKHERGKGADSHMNKVILMGRLTRDPNVRYTQQNSSQESMCVARYTLAVDRWGQRDGQPSADFISCVAFGRNGEFTEKHLKQGTKIVVTGRIQTGSYTNRDGQRVYTTDVVIEEQEFAESKKAAGEQGQNADYTDAGDGFMNIPDGVDEQLPFAMNKSTLKAEFINAKIKDAKYIGVSIKTEGSSQPEIIINPRENFDAKFDYYMEAYDDDLILIAAKGKKDIRIVAAGHGNRFEDIENQLIGEKGKGWRELIAGAIDKAYDHMIESTPPQSEEEKTHCEMIKEAVKGMFINESRTAAEAEFIKMHIVDYEKIFDVCMNDDNLEFKKGLVRLQKMQNEYVMQRERTGTANEMSNNKNNENSNVVEIVYMTTQPKTDLPTHVTVRSTGRPSTVLCEQVYSVSTERIGTYIGECTDKEMENIDIALMISLQLDSSMKTSKKYNETIKNQQEEIELYRNKIQAMEQELKEKANVKPENTASSEETIRLQTERDTYKTMYEQLLNRLVNGGAAMTEIKDPILAAMEFSLNYTLKRFENTETENGKIIREGIIRGKTLVEHLRIFGADVYGKSKEQFAEDIKDKTNIVMMSDEEYKEYIKAKRLYRVIKKEELMAAGFSVKDALNKNSKAGIDESPRARFRTKDISIFKMYRNTMNFYSVKDIEELAGDILLSGLKQNLELVYAPCEKGEYRIVAGERRWEALKYLVSKGYKDFELATSKLTTPQDDDEEQVEIIIANAYRTKTISDMIEEETRLKASLERMKAAGKKIKGYDLQSGRLRDVISSMLHMSKTKIAQIEAVNNNLIPEWREELKKERLTFSAAYELSGMTEDEQREALGKFAETGELTHKEVKDMKEAKAAGQQVPESDTAESSMNPPEVRAGDDYETPHPEGITSICYSCTEYETCNVKTGTCTSCDQYNNRAEAYKTDEQRYSEEQDAIDRETKKKLREMEQEEKMQSLPSDTQETGQKVHQIRLAKPYFDDVANGIKTFELRKNDRGYKKGDILEMMEFADGKNTGRMVKVLVTYILEDYTGIEDGYCIMATKLMKDGEAMGNIVKTAKCRFCGQMTQIESDEELTTAQAEEQATMTCNCPDAVEYQKEKQRKEKAMQNVAALFGEAAAPDKRCGEGIVKILKAAVEEIYTGGLAKVTLNLRGGVKASISQNSKGEINVERTETKKQKLTEMAGMRAVHKKSGTTFKYSGDLEKAVEKAEKELKEKDGTERHAFLKWQYDNAKKHLKHITEDWRICVISMRIIAVMSPKGGIGKTTTSDSIAYMLGEEQGKRVLVLDGDPQGDTSKTFGVFEPDGIGMSELLEKHECVGGTYKTGDLIRPTEYSHVDIIPANGYLMQTDMNLLLKSEDNQVTRLREALQEVSDAYDYCICDCGRLLDMVVINILISAELIIAPVKVGGYEIEALQNLEEQIEDLRDINPDLRIKALMTMRQKNKTSLEVEEWLKSDSGFDMFVTPVRRSIVAEKSTTAMMPLPKFSKRGIVSQDYRCVVHELLKEMEGMNMRYAKRSEDTEQINVVSWAGWNMNRYPELKWLFHVPNGGSRNRAEAVKFKQMGVKAGVSDLQLPYPKGSYCGLLVEMKFGNNRQQDTQKEFLADMAAAGHFVATCYSAEEAIKVIEEYLNLSDLAHRERNLSMSIPNNSILKDGKIKMCVAAFGSKKPEQVEERQQETTQEETTHAETVQNPETIVQTAEEIESKYKVFDTMSEDWGSCDLEGFVYYDLPEQYADKGYFPEKMQIYTRCLCKQNDVPYALVLALIEHESGYEFDKVGDSGQSKGYMQIYEKWHTDRMQRLGCTDLMNPYQNVRVGIDFLSYLLKKYGTVQDALAAYNYGEKGAREHLWSNGVYVYSYNSAIMQRMKEIEEVVGKMARKKGMQFIPYDYEAAYNKALEDMHEWFIENLFQHRKKVVYALKEITAGDQFEIEIYPQFRSMDEVPPEGRTIKKDNNKAQKNLNDKNARKYVERLINENFSDRDIWMTLTYDDAHLPPDGDVDAAIKNVQKYIRRINYQRKKRGLPNAKYVYVTAYNPDAEIRWHHHIVMDGALDMETVESCWKQSSRNEIRRLQTDENGLSGMANYIVEEKNRVPSEKRWNSSQGLRDPRIKVVHSKRPAAGGSYKKIGSFVDGMVKDRDSIPEILKKWYPDMDFTNANVYYNDFNCMFYIHARMRKRRLQGEKTEKTGKTSKATMGAERSGCSRMRIGLIDVDGHNFPNIPLMKLAAWHKQHGDTVEWYEPLFSGHMDRVYMSKVFGFTEDYPYFVDADEVIRGGSGYCIELTEGRERYIKERDKELPPEVEHIYPDYSIYPRLTHDKAFGFLTRGCPRGCEFCHVGCKEGRRSRKVADLSEFWKGQKNIVLCDPNTLACPEHMELLQQLKDSKARVNFNQGLDVRLMNEKNIELLKQIKLEAIHIAYDRYTDKDIVEKKMKMFKEMTGYNKNRGRVTVYILCNFDTTIEQDIERIQFCRSLEFIPYPMIYDKKHADPIYRKLQRWCNNFVFWKTPRFEDYDGSIRKMIFNVKSINTVDNAGKGVDGMKRPREPPTGGIKMDIGRILPTEAAAILNVSPQFVRVAMQQGKLPIGTAVQMSSIWTYHISEKLLADYSGKNIEKEIERIRGGVEKMEEIRRTKIKEAMKETLNVYEKLDLNMTEIEIVSRSQNVATKVAIAKKQLETEAEERLEEQQTPMKTKIIKWMPAICSTLAIVLSIISLVLRLYRMSKSIHRKELIVIYRQEILKDIRLFTSQPVAKFYDSLFLNLDLSFVPEFPKTGRKGFSNHAMICSFIVMKCEGFSMISDLVDYLHNNLLIAHFCGFDISRPLPSYWTFDRFLKNFDNKILSEIMKTQVLFLSKEGIVDTSFIGLDSTPVSANTSQNNPKSFLSNKFKPGNQPRADSDCKLGVHTASNQTNEKKYEFYWGYKNHVLVDCISGLPIYEMTTTAEVHDATVALDILAATHSFQPITDCTFLADKGYDVKNIYNQVKDLYNGECIIPLNKRNSKNPKLLPQGNPICEAGLAMWKDGKFSDCGRTRQKFCCPLKSSKDTVCPCHHKNFYNGKKHRGCTKYLTIPDDLRLSIDRDSKYFESNYSLRTECERYNSRFKNTGQERMWVKNKASVTNLNTLAHISLLAVAVAAITRHSGQSYRKLKTIKRIAMTQNERVKEIRKTLGLTLEKFGERIGVTRGSMSNIENGNRNLTEQMTKSICREFSVDYMWLTTGEGEMFIDTDDDFIERIDRIMAGEDEARKNLFKFMLELSDEDIVALDRLMKKAIEFTQNNKEKDMNYKKAIVEIVGKIQNERILKRIYKFVAYLYTHETDSMKILVWEMRTSKGFTLMELSKKSGIGKSTINNIENGKVSPTLFQLEMIAIALGVKITDLFESEYKMKLPNGFGTVYKLSGNRRNPYVAKKTKGWEIDPKTGKSKQLYTVVGYYPTRKEALTALAEYNKDPFDLHLATITFEEVYERWSEIHFEKIKDTNGYKAAFNTSKDLWKMKFVEIKLDHLQNVVDNSGKNTPTLKTLKIMWGLMYDYAVVHEIVSQDKRDIVRYVDISKAGNPNAYNRKPFSKKEISILWKCKDSNVYVTVILIMIYSGVRIGELLDLEKKDIHLDERWFYVKESKTEAGIREVPIAEKVVPFFEYWMNRKCDHLICTPDDEPFQYRNYYDSYWIPLMLEFGFGKFIIDETKKEPVYDGHRPHDTRHTCISLLTEKKVDERFIKKIVGHKGQGVTETVYTHIELPTKLEAINKIMNRTEYKNNFYKEHYERINLAVPKGMKEIIKGLASDKGMSVNAYIQDLVRKDQCGLFDTMQIAEKNREMLSGITGNMHNGYDIIFKDGHSCHCRTKKDVRSCIIEYCKEKGDMATTKYYGTGRRKSSVARVYLVPGTGKITINKRDIDEYLGLETLKVVVRQPLVATETVDKFDVLVNVRGGGYTGQAGAIRHGIARALLQVDSEYRPVLKSAGFLTRDPRMKERKKYGLKAARRAPQFSKRMKTFMASPATIDRKWYVVDAEGKTLGRLASEVAKVLRGKNKAIFTPHIDTGDYVIVVNADKVKVTGKKLDQKIYYHHSDYIGGMKETTLREMMNKHPERVIEYAVKGMLPKGPLGRQMYTKLFVYAGPDHKHAAQKPETLEFMELISLKYAIFVIVLLVLYYCFPKKYRWYVLLAGSMAYYVIICKWYVLFIIFTICTTYGSTIWIDKLLKEQNAIVKSHKEDWDRQTRKEYKEKGRKKRVAVMLFALLCNFGILAFLKYIPYAGELGLLLPLGISFYTFQSMGYVMDVYREIVEPEKNFLKVALFVSFFPQIIQGPIAIYDKLAGQLYEGHSLRLENLQKGALLVLWGVMKKLVIADRAVNIINFVMDKPMDFSGTYVFFAAVVYALQLYADFSGGIDIVRGIAEMFGITMSTNFNHPYFSRSLTEYWHRWHMTLGDWCRNYIFYPLSISKRFLNFGKWLKPRFGAHISKVLPGCIASVITFIVIGVWHGANMKYLCFGLWNGIVIMLAELFAPVNKKVAGGFFKLTGLREKGIFATIVSVLWTFMLILVGYYFDIAANASTAFHMLFKSVTDFHISELGINNIILNLGACGLDEYDILLLIICTLLWFFISFVEENKKLDMRDFILSRKLPLRWAIIYLGIFIVIIFGYYGPGVNPADFVYMQFMRFTKVKEKIIKNKPINSTDEGKGRHRKVIRIGAFALVFVVLFSFVSTFFKMTDAVNIATIEGFYKEPKNTIDVMMIGASEVYADYSATEAWKNYGYTSYSLGVSGVPGSLYKSMLREALTRQHPKVVVFEVNGFLQNDSYYDRTVKLHSWIDNIHNKENRFDTIQEIVPKDEQDNFTNPLKLHHSNWKDIGKCAHTFATRVGMYFAKTSCMKGFSSIAKYSDCPSGKQKKLYFTDKSRAYMTDLLKYCKAQGVEKVLFARFPHEKEIKNPQVLCDVKELVESYGYDFASFEGDKEFIGINERDDFYNSEHLNINGSLKFTAFMGKYLSDNYRLNADHSPEIQSAWGECARRADKVISACAKDTDLSLGNHYFEMSVYLPYNFSSSLATNKVADTNNEAKPAKELNTPVKKMRVKMIVAYDGTNYCGWQIQPNGITIEQVLNEHLSRLLKEDIKVTGASRTDAGVHSLGNVCMFDTNTRMPAEKISYALNQKLPEDIVVVDSCEVSDDFHPRFSKSRKTYEYRILNARFRNPTRRLDTYFYHYPLDTEKMSEAAKYLIGEHDFASFCSANSQAQTTVRTIYDCTVSKAGDIITIRVTGNGFLYNMVRIIAGTLVKIGGSDMPADAMKDIIAATDRAAAGPTAPAHGLTMIGLKYEMIRDITIGQYYPAQSPIHKLDPRVKLFATLIYIIALFSYKGIAGVLFIVAALAAVIKISKVPFKFMVKGLKSIIILLLFTACFSVFFTQGEYTIWEYGILHISDTGLINAATMMIRLVLLIIGTSLMTLTTTPNQLTDGLEKSLGFLNKIHVPVHAIAMMMSIALRFIPILIEETDKIMKAQMARGADFEHGNIIKRAKSMVPLLVPLFVSAFRRADDLAMAMEARCYNGGEGRTKMKPLVYEKDDKIAYLFIFAFLAVVIVLRILLPVNLGNLIFRMSIILDHINYCYSADSAYKVQALKDVSLEINDGEFIGIIGHTGSGKSTLIQHMNGLLKATSGHIYYNGQDIYDNDYDLSKLRHKVGMVFQYPEHQLFETTNFEDVCFGPKNQGLDRKTVELRAYEALQNVHFPEDLYYQPPFDLSGGQKRRVAIAGVLAMHPDVLILDEPTAGLDPAGRDEILGLLLQMKKDLGITIILVSHSMEDVAEYVDRIIVMNSGEVMFDGVPKEVFSHYKELEAVGLAAPQVTYLMHDLVEKGIPVDLSATTVAEARDSILKAFKMGIIKTSKLVHEFIRRDEEGNVESITTALDNVNLDIKEGQFIAILGHNGSGKSTLAKHINALLAPSDGTIWVDGMDVSKEENVIPVRKSAGMVFQNPDNQIIANVVEEDVGFGPENIGVPTDEIWQRVDYALRAVGMTKYRTHSPNKLSGGQKQRVAIAGVVAMEPKCIVFDEPTAMLDPNGRKEVIATAHELNKKKGVTIILITHYMEEVVGADHVYVMEKGKVVMDGTPREIFSRVDELKEHRLDVPQVTLVADELKKAGLDIPDGILTREELVNALVALKNRMAKLNIVLHEPEIPANTGNIGRTCVATGTRLHLIEPLGFSLSEKALKRAGMDYWKDLDVTTYVDWEDFLERNPGAKIYYATTKGRHVYSDAHFEPDCYIMFGKESAGIPEEILKEHPDECIRIPMIGETRSLNLSNSVAIVLYEALRQNNFDHMRLEGELHHLSWDDMRDPLSSTIKTIQPSGIRKFFDIVSEMKDAISLGVGEPDFDTPWHIRDEGIYSLEKGRTFYTSNAGLKELKVEIARYLDRRYGMTYDYNKEIMVTVGGSEAIDIALRAMLDAGDEVIIPQPSYVSYVPCTVLAGGTPVIVELKEENDFRLTAEELEAVITPKTKILIMPFPNNPTGAIMEKADLEAIVQVVKEHDLFVISDEIYSELTYVDKHVSIASFPGMKERTVLINGFSKAYAMTGWRLGYACAPETILKQMLKIHQFAIMCAPTTSQYAAVEAMKNGDEDVAQMREEYNGRRRYVLHRFKEMGLKCFEPFGAFYAFPSIKEFGMTSDEFATKLLNSKKIAVVPGTAFGECGEGFLRISYAYSLDDLKEALGRIEEFVTELRAGMDNKMREKILTFIEKNSRINLKELAIMLGVDEASVANEIAAMEQENVICGYHTLIDWDKAGLEKVTAMIEVRVTPQRGMGFDKIAERIYNYPEVKSVYLISGGFDLMVTLEGKTLREVSQFVTDKLSTLDQVLSTKTNFILKKYKDHGTIMAAPVKSDERGIMSMKNGKISESVLKRSVLKQLHTKSDRILFKPAVGEDCAVISMQAGDQTKLVTATQTFTLDVSDKHVRANCAVYDALNNIYAMGASPVGIELALLVPTTENEAVLRETVRAIDAVCEEAGIVVLGGHTQVSRAVKNIVVTVTAIGEAYEQALTPSSAAAPGMDVIVTGYVGLEGTAILANEKRAELETRFSKTFIDKSAAYIDHISTAMEAASAIGAGVAAIHDASQGGIFGALWDMAEASGIGLDIDLKKLPIRQDTIEISEFFDINPYKLLSGGSLIIIAADGTRVLRELEKTGQNAVIVGATTDSNDRVLISGEERRFLETAQTDEIYKVFNMKINKKALLLGTMAFVLVAASGMVSAYASGSSGTKKAKVQTITEGVCIGSVDVGGMTKEEAKKAVDAYVDSIKDTFFSLKGANGSFDATAQEMSVSADTDAAVDEALSVCHEGSLIDRFVESEELKKGNVAVNMYLSVDKQKTANMIYDKSDELNIKAVDNSLQRNGDSFDFVPGQEGKEVDVVKSVYAINDFLQNSWDGSANEIELVTNTVQPRGSKEELSKIKDNLGGFSTDFSSSAAGRATNVKNACSLINGSVIYPGEQFSVYEAISPITTDNGYQIAGAYENGQVVDSVGGGVCQVATTLYNAVIRAELEIVQRYNHSMIVSYVKPSDDAAIAGTYKDLKFKNNLDNPVYIEGYCSGGVITFNVYGVETRPANREISFRSETISEEDPVTQFKFDAGQPVGYFNTEQSAHKGVTARLWKTVTVDGTVQSDEVFNNSKYKSSPKIVTVGTAGASAEVVAQLQAAAAANDEGSVKSIAASAAAAVQAQAAQTQTQDPNAAGQTQPTDQNAAGQAQGTQTQPTDQNAAGQAQGTQTQMNSMYDFNKKRNQKVVAIVIIVVIAAMLVTTFVSSLVMSNIDNIKNYTVIDLEMTGLSAKNDKIIEIGAARVRGGEIVDTISTLVNPKQHIPQRVQELTGITDSDVENAADMDAAVDNLLDFIGDDIILGQNVTFDYSFLKQWAVNHKRTLSLNAYDTLKIARKCLPAEQSKKLEDLCEYFGVSRENAHRALDDAIETKQIFEKLLALMDEKGEPVESKPLVYKAKKQTPATAHQVRQLKELMTEYGIADVISWDNLTRSQASRLYDEYRSKYINRCEMNILLTAINAKYIHSNLAVYSLRACAGEYRDAVELAEYTINNQKDYILEELYKRKPDVLCFSCYIWNIDYVTDIAREYKKLCPSVPIWVGGPEVSYEVEAFLRENPYIDGVMIGEGEDTFRELCGYYAHKRNLSDIAGIAFRKNSTGNSTSVNNMGDNKAGEIVFTSPRPIKNMSEIPFCYDTLDDFSNRIIYYESSRGCPFSCSYCLSSVDKTLRFRDTEIVKRELKFFIDQKVPQIKFVDRTFNCNHAHAMELWRFIKANDNGVTNFHFEISADLLNQEELELISDMRPGLIQLEIGVQSTNEVTIKEIHRTMKLERLKEVVRLIQSGNNIHEHLDLIAGLPYEDYDSFGRSFDEIYELKPNQLQLGFLKVLKGSYMFEHAAEYGIVYHDKPPYEVMSTKWLSFDDVIKIKRVEDMLEVYYNSGQFEITMKLMECIFDSAFEFFQELGDFYEANGYFGMSHSRIRRCEILLEFLALYLHGCDSDAMTSVGLFENHGDRDNTDFDENAQIYSMIQESLIFDLYYRENCKSRPRWATDIGSFKHMTHAYCKNGKLSHVEPFHYIFPYKHMRKLDELPKYHKEPVWALFHYDMRDPLDHQALVEYVEMLKAYKYRIYPNSEQRIQIAKTFGCCRFVYNQTLAYRKEIYEKEKKSVSKTDCNNYCNRELKKDYEWLKEIDKFAMTNAIYNMDAAYQKFFKEHAGYPKFKSKHDNHKSYTTNFTNGNIAVDFETGKIKLPKLKAVKARLHREYSGQIKSATISQVSSGKYYVSILVETEHKELAHTNHNIGIDLGIKDLCITSDGKVYENLKIIKKYEKQLVKLQRQLSHKGKRSKNYYKTKKKIALCHEKIRNIRKDYLHKVSHEIISENQVIVSENLQIKNMVKNHHLAKAISDVSWYELTRQLEYKAKWNGRKYIKIDTFYASSQLCSVCGYQNPDTKDLSVRTWICPKCGAGHDRDINAAKNILTEGLRQIAMSKQISDDIKQFSYEICQKHKVIIRYMETDKDHIYYMIETEPTMSISKIVNLMKSYTTYHIWKKYSHYLRKHFWKEHTFWTTDILSAVMKQKLRNLSAPANIIFAILAVFIFIAPLQWSGKVLGLIPGMEKADDYLLQAIVETVVLVIFLGITYIFGLWDIFKENAAGWTRSLYTGGFFIVYCLYAVVSGIYLCFLGEHGDVKAFYNIIFFFIVVCLVGLVEELVFRGVVFNLLLRAFPKTKGGITGAVVLGGVLFGLMHFSNMGAGVKFSSCLIQVISAGLMGVLFCMIYASTRNFWMLAIFHTVVDMGGLLSSGIFEGGGVADRINEFSAMNCIAFVVLGIPMLVMLRKSRRIRLEMLYNNVTIIDDEREGAKLAVVSLVLGICSIIFSFFGYLMGLGIVGMLASKMSKRAKQYNNAIATAGMITSIIGFVLSVICTIGMMVLFASGIYDRLVNMSMMGWIEYLLIVAGSSLEIFVAMECQGSLIQKVNKKQLTAICFIVAVCQLLAMYIGYFLSSFLNGKYSVKDEALLGEIISIGILIGLGIRLIGKAIRNERIEEHCQAQLDMKRVLRIAGITAFYTVLAGIAFGFLGTGLFTIMIMVALLTVICIVAGIYTGYHYGFEQKTKVYIVGAILFWAAGIDVIVRLVSAKMKLPELKEKLKSKYIVRVVAGVLTIALVGTGIGATAVFAEKNSTAVTAEADSTTGSSKDADDIADKLMDSVSLKDNDADKDESVYLISDANGNVNKTIVVDHLKNKDKKDTLDDASNLSDIENVKGKEKFTQSGDKLTWQAGGKDIYYQGTATEEPPVTQKVTYYLDGKEISPEDLAGKSGKVKIRFDYTNTTSYTETVNGEKQTVSVPFAAITGLVLGDGFKNIEVTNGKAEVSNSSSVVLGYALPGLKDSLGIKDGDLDGDVNIPEYMEMTADVENFSMPAAMTFVVNASDYVSTDGIDTSDLDDMINDLKDASTQLQDGSKTLAEGTDTLADGLSTLQSKLGTFASGVGTLQSGLKTYTDGVSTLSGGLNTLGNSTGALVSGADKLNSGAGQLASGSATLKDGLKAYTDGASTLNGGLNTLGNSTGALVDGADKLNSGAGQLASGSATLKDGLKSYTDGASQLNTGLNQLNDNTGSLATGVTSLNDGAKTLSDGINAANKGAAGVSAGAAQLKTSIDTAKTGADSLAAGAKQVDEGVGQLTQSLSDMPETIKTNINKSLEPLNELNVGTLFKTLGYIDTDKITADNVSAAADAAVNNAGDIIDALTNMQNQNPSATYNQILVGLSQGKGAVSVYSAVNQSVTDSASTVQALKDGSAKVSDGASSLDAGLGQLSDGASELSSGASDLAKGTTQLATGATELQTGTQSLADKLPELTKGITSLVNGSNELVKNNDTLNVGATALNAGASQLSAGTQSLMNSVPALTSGIKQLVDGSNTLVANNDTLNAGATALNAGASQLSAGTQSLMNSVPTLTSGIKQLVDGSNTLVANNAQLNSGASQLADGTNQIVSGVDQLTTGSKTLSEGAHTLADGMVQFNEEGINKILDAYNGDLKPFTDKLQAVIDAGEEYQTYSAIADGQTGSVKFIYKLASIDAKADSDKMIKFGKGVVKYRVLILIVAFALLIPSGISFINTRINFDILSYLPSQIETMKGQDIMVDEFGTGALSFVILEDMKDQDIETLADDIEDLEGVKDVIWYGTIADSTLPREAIPDEVYDAFNNKDANSQLMLVTYSDTMGSDETMEAVNKMDKMVKNHCFVAGMAAVNADTKTLVMQQAPIYVIIAALLSMLVMGITMDSIIVPMLFLLSIGMAIIYNLGTNFIQGQISYLTLALTAVLQLAVTMDYSIFLWHSYQEQIDRYDGDKKRAMAHAISHTIVSVTGSSITTIAGFVALCFMSFTLGLDLGIVMAKGVVFGVIGCVTILPALILACDKAIEKTKHKILMPDVSRIASWVTNHYKILAVIFIVVLIPAIYGYTHDQVYYDLAGTMPDSAYSKQANERLDKEYAMGATHIIIAPSDMSKADSISMINDIKKVDGVKLAVSLDSILGPTIPDDMVPDEAKEIFKNGDYQMMLVSSKYATASDEVNNQITEIKKIVKNYSEDAMLIGEAPCTKDLITITDTDFKRVSAVSIVLIFLIILVVFKSVSLPIILVAVIEFAIFVNMGIPGFTGTKLPFIASIVIGTIQLGATVDYAILMTTKYRKNRYTGMDKKPAITKALADSTNSVIVSALCFFAATFGVGLYSNIDMISSICILLARGAIISMFVVVFILPSMFMIFDKVICATSAGFKNKNLTAMSCEIYKSINLYIRYDTYMILYLISDTFSQHFHIYMNTCLFMILLYELAMTQQGKNAIDLVLAESLIELSAKKPIDKITIKEITDKAGVIRPTFYNHFQDKYELIEWIIKNELLEPIKPLLNAGMIFEAIVLMLNNISANSVFYKKALKLEGAVTFNQIAMKCVCEMFMNIINEKSTGKKSKYRWLTPEVISTYYAQSLCFITEGWIAQGMDDIEPKEMAEAYMYLITRSMDDILSELMRRMEFKMERPGLTKVGDHLKVTESKLPTSYYYTIEHAIAMSGNYVVSERLKSREGDVVDVRETEKGYFVTMEFDEMKEFLGRIKADFLLSSVLCIALGLVFIIWRASVLTIVANVLAIVLIIIGVVYMCSYFLSIVTNGLSALLGLMVLAVGIWFLVQPKVVVSLIPIVIGLVLIFHSIRSIIEAVDARKYGYGGWSVGLIFSIISLIFGIICVTNAFDVMKTATVVVGIILIFNGVSNIWITSRATKAESSYNKQKEYEATFVEDRKEDNMDKNKIKNKLKDDPAFTLEVQNPEVEALMTQYSSDKKAETLNKLIEKCTKSRFLVPANVGENNKPIPLFIKNGEGEAFMPIYTSKAQLSKDHPSPCIVNMPFLAVNNMVANKESKLDGIAFNPFTHNLIFKKPLVEKIEAVEKARREGHPTSPTKGKTVQMTAEQYVIFERMQYEHIFLPAKMFEGGKEFMDRLADEKEKLIDELYEEAYQQKRMYPYMEEDFSVMSMQISDTLNVTRVDFPTRDMAPNCAIRAYLVWDDAASQGRYFVIDAKADKTTELVEITEDHKRLGYGAAPVEGAELQTVLDLVKKSAEEQNMRTLYTFDKHNYSDDMEVFERFAVRAVIIRDGKLAMQQAGEGYYKILGGGIDAGETNEVALAREVREEAGLLVVPESIRECGKVIEKRRDIFEADKIYYCHTYVYFCDVKDEHVAAQMTDSEIRLEYHLSWATPDEIIKANSAFLDKEWIARDTKIVELIKEMCMAGNQGNSRKKTTHNEKKYKNATEQPRVKEKSSRSKSGNVCPYAKKCGGCDYQGVEYKEQLKNKQAYMKKLLKPFCFVEPIVGMKNPLHYRHKVHAAFDCTRRGQIVAGAYRKNTHDVVDIESCMIEEQESDEIIRDIKDMLRSFRIKTYDEDTGYGLLRHVLVRKGYATGQIMVVLVLASPILPSKNNFVKALRKKHPNITTVVLNVNDKKTSMVLGDRNITLYGKGFIEDKLCGCTFRISPGSFYQVNPVQTELLYEKAIHEAHLTGKERVIDAYCGTGTIGIIAAKNAGEVIGVELNRDAIRDAVTNAKRNDIRNIRFYNDDAGKFMVEMAQKGEKADVVIMDPPRTGSDEAFLSSVVKLSPERVVYVSCGPETLARDLKYLTKHGYTVKRATPYDCFPYTEHIETVVLLCRMRNNSRKNNRRCRRNTGASQIKLIGIVAVIVVIAIIIVISCFNKAKKDSNKVKDTEPATENVTGVTEQESETEEAKELFTPKESEATATIGDELESSYAVVIDEQDGTVVAGKNAHEKMYPASMTKVMTVLVAAEQAEKNAIAAAKTENAEENAEENTEIDRQAVIENKLNEVVTITREATDYSYVHDCSTTGFLDGEQVPLRDVFNGTILPSGGESAYQLALYTAGSMEAFVDMMNQKAAELGIGQSTHFANPVGIYDENNYSTAYDMAVIMQAAMQDDICKTVLSNHTYSTAATPQHPENLNISNLFLRRIEDKMTSGEVIGAKTGFVNQSGNCAVSYEKAASGKTYICVTAGASSGWHCIDNHVYLYNTYGKMNTASKTRHVFILFLADIVWGIAFVAQSKGGDAVGAFSFNGIRFLIGALCLPPVIKILDKKELTVNRPESKKQKKELWIAGTCCGIALFFASNLQQLGISMGAESGKAGFLTATYILMVPILGIFLKRKCGAKIWIGVFIALIGMYFLCMNGAFSLSGSDLLLLAGALCFAIQILVIDHFVSQVDAVRLSCIEFFVTGLGSCIVMIFTDMGPSAGGLAQWAQSLCTWDAWIPILYAGIFSSGVGYTLQIVGQKGLNPAVASVAMSLESVVSVIAGWILLGQMLGGREIFGCVLMFIAIIIAQLPDREYTKQVTVMTKKDLFDGLNYIDDQIIEEAQPTGESAGYSDEIYVKNHETHHGGKEDKNRKKHKKFARAAKALATVAAVLVVAVLGTEVVRLNNRIDELETKTANVISQNNAQNNVYAGIKSGAKLGDYESASDYGKLYDVAKKAEASIRNTASGDLLESADATGITSDASSANKQEAAAKTEYSTTNVMTEGVDESDVVKTDGKYIYMVEDGQISITDISNGKPGEETLFRPDFEVPSDTVEELYISDGKMLIISNHAGDKDETICYSYDIADPTKPVLIGKARQDGFYNTSRKIGNTVYVFSDTYIKTSDMNKNVALQEDNLEKWVPQVNGKVISYDCFYIGEDTYSGTVISSFDVDKPDKTIDAKCIMNNSGEVYVSSNAMYLYHSDWSASRELTKISKISFEDGVMKTGETTSVNGYLNDKFAINEQGGYLYVLPTSNTGSQPVNSLHVLDKDMNEVGVINEIARGESIYAARFVGKYVYFITYRQTDPLFVADISNPTAPKLLGELEVSGFSEYLHMWDDTHVLGIGYGDSQQSKIKLTMFDVSDPTKPVEVNQKLIDSSESWSNEFVYNYKAILADPEKNLIGFTANDYYLFSYDSENGFSLLEQQALSYKNTEGYRGIYKDNDFYVAGNGEIKHFKLAEMYTQEQILDMYFDRNQQAVSATSQMYGAKLTRFADTMVAHEDALECVNDTYIAAWNKIPPERPMRFLSWLYRVCRNIVCDRIDWNNASKRNSNMNCMLDELEECLADSNAKYEGELSDIGRCLSDFLNGLETEKRVLFVRRYWYGMTIDELADMSGRSKSSVKTTLFRIRAELKKYLDEEGVYLMKQRELIKKLEAAGFEFSRHGGNHDVYVRGSDIEQIPRHKEINEMLAKAILRKWGLMKQVYPVIFTQLNDKKDTVLINVPDMNILTEGFGLPDAIEMARDAIGANGITLQDLGREIPVPSDISDIDIKNGPFDNTGISHVSFVDIDFDEYRRKTDNKCMIGFVIWSLLGVFIIGLGIKDMFSKNPVGFWANTETIKVKDVKGYNRASGLLFIIYGIIFVILGIPLLDGQNTPYVLLSVIGVMVETIVIMAAYSLVIVKKYEEKMKFMQTEKKQLLIYVIIAYGITYVMGLLMWYSYGKGLDLSAFPKAQMLYPAAGVMMAYLITKKGDKNLPTAFYIFFVALTVVLVVCTAASVLAPQNRDLMSMPYSQWAPIMNYVIIGGSVIFWILLLQSGKEKRRSYGLNSEHWNISIRMILLFIGLYLLRFVIACALSGQLSEFGKIMANPTTWIIFFTVLVNFFLSVVAFFGEEYGWRYYLQPLLQKKFGLKGGVILLGCVWAVWHLPIDFFYYTTPDMGLAALASQFVTCISLGIFMAYTYMKTQNIWVPIIIHFLNNNMMVVFSGTYSADVLQNQQIHWGAIPVALVMNLLIFGWVIFLKPFKEKKAMGRVKRSNALSRIFMRYVLVMLGSLVGLVIVAYLLLYLLISVGCIYPANYAEQKINEAYDTILRADKVTAEMIPALCDYVIFSENGEKIGGDLSEQYEQIAWNVAKHGNASGKYFYKVIVRENEYVVLQYRLTPQYHSAFLREHFIGPQNVMIIMSVIGAVAIIIIPSIRFGKRIKKQMQPVLDAIGQIKDQNLEYETSCSGIKEFDDCLSAIDDMRDALRESLEKQWKTEQEKKQQMSALAHDIKTPLTIVRGNAELLSETELTTEQKNNITYVLNGTTQIQSYVKQLIDVTKSWNCSDVTYTTVRLEDFFADIKEQALGLVEIYHQKIDWKAEQSDKKVTIAYDPMFRAVMNVIQNAVEHTKENGIIYIDAKEQDGRLTFIVEDSGSGFTKEALLHGTEQFFMDDTSRNGEAHYGMGLFFAKTVAEKYGGGIKLSNSENTGGARVEIFFLSSQETSMAKILAVDDELAILEMIESILNKDGHLVTKVSNPLKINMEELHRYDLILLDIMMPGIDGFELCKRIRALVDCPILFLTAKTEENSLVNGLSLGADDYISKPFGVMELRARINAHLRREHREHSVRMVLGRVCIQISQKKLLVDDKELPLTKAEYEICEFLAKNRGQVFSKEQILEAVFGFDNESNDSTIITHIKNIRAKFADYDYTPIKTVWGIGYKWEEMIGRALNADLRKMKGTSVILAHLLIPIITSVIFLIYYFFSPWNENMKVIAFYQAIGAGLPVLIGIFTASVMEQEQNAGDFQNLLSLPDKPAAFLSKLLMLLVLCLCSILLTAIIFGIGFGRIASSDIEIMKGCIFAALLLWGSSVPLYLWQLILAFQFGKGVSIGAGIISGLISALMLTGLGDYVWKYVFVCWTGRVPYTYLQSVLGETSVGEWLSFIPGCLIFTGISMVYYFWWVNHWEGNRISEMVNIIKAEHQKAKRTMRKKFIWGFPLLTFVMAFIFTLGMTNAYAESVWNWWYTLLLPGMIALFCYLSVAQEKKIKYYHLMTIPTDRRKLLLGKIIYIGYMILFSNVIVFAGATLGGFLLTTHVPVKGALIAVLFLTVSELWEIPVALFLSERFGMIVNLFVCLFITVSGVIISQTRIWYVLVSAIPMRMMCPLLHVLPNGLAAEAGNPLLDTGVIVPGMCLSIIWFVFVTVLFLKWFERREVKMEMMLQTQNLCKYFRKQKAVNNVSLNIEKGQIYGLLGPNGAGKSTTLKMMTGMMKPTAGKIYFDGKLLDRKDLSKIGALIENPPIYENLSARENLKVRQLLLGTDENRIDEVLQIVSLTNTGKKKAGQFSLGMKQRLGIAMALLGEPELLILDEPTNGLDPIGIEELRELIRSFPEQGITVILSSHILSEVQLLADKVGIISGGILGYEGALKQGDNLEDLFMNVVRKNQKAGEIHGMAMNNNLAEVHPELVSEWSEKNLLLTPDGITFGSNKKVWWKGTCGHEWQASVKARSNGEKCPISAIMDCRKGRMHLSFCAKNMLLNEIINEVGMTKRAVKYYEEKGLLSVDKDNNGYRNYTAQDVETLKKISVYRKLGISIKDIQSLLETGDKSILLRIYQEKVQEKVLKDSELEALKQFIDDGDADKANEALDYQTVENAIESLLPGKEWGDYFKSHFKPFLNVRLKTLEQKQALQNILEYCDETTLKVPFIMGIGAKMIGGIAQETRTADEMIAYYRDMSESEYERLKEKVWKGAKMKNGIMKYHPAFITQRKMQKELQNKGYNDIFIPNLMVLSPTYAEYKKALDNVNDRMCRELGLYYDSNYNLVIKKDNSKSCGMLLSAVNNLKDSEDEELHLLMVDDHIPAGAKLYMFKYELKKIFSKRMNKVLLAAVLVMTVIYSGMAIGSMSYTDADGQSHTGIDAGRLLAEDVNQWKGKLTTEKISEVINDYKTLSAKYQDEIPNTEYGKTVQSYYDIYSFVIGVLTPDSEWNEGAVYQLSDEQLQDIYTIYQDNMKKMAEEYGTTPEKRSYLENVYKKIEIPFTFEAKGSWATMTMYAQTYVLLMAVIIGFLVAGIFSGEFRPGTEDVFFATKYGRSKAIKNKIIAGIFVSTVIYWIGVGILSLISFAVMGTSGFFTPYQIDDPYSIYVMTYGEYYLLILVGGYIATMFCAALTMLVTVKMHTPNLAVCIPFFLLCMIPFIARVLPAFDAFFNLLPTVLTNILNANFPNFSYLAMELQFKNVTKDYGNVHAVEHVTHSMGKGVYGLLGVNGAGKTTLMRMICTAITPTSGEILWNGKNIFSLGASYREILGYLPQSYGFYPDLSVYDYMLYIASIKGIRPIMAKKRALKLLEQVGMAEKRKRKMRTLSGGMIRRVGIAQAMLNDPRILVLDEPTAGLDPNERIRFRNLISELSEDRLVLLSTHIVSDVEYVANEIILMKEGKFFYTGTSDEIILSMDMFVWNCIIPKSELNNYMKKYLIGNVRTVSDGVELRVLSKMPPTGNAVQVEATLEDAFLLYFGEKAGDKDDVQIMKQYQRKIEEYKSLIQKEYIRETAVHTVKERCSDIMNRQDNRRASYFEFLFEQFKFIKKRWWVLQGEILILLWILLVDSDVGANTERTLGAMSVMFSVMIIPEIWKNRSFSAVEIEKTAFYSLRQICAARILLFAVVDLLMTTFFFGVSVYTLQISAYRLIIDFLVPFNVSCCICFRLLYSKWNDMEYIAVFLSIACILIWTLIVSTDSIYQRISMPIWGSLLIISFGYLIFCVHKSQCNCEINWEVKSSGTAIMIADFLLVQKIRNGDNQAGNQLVEKYYSSIYQYCYLHTHNQEYAEDMVQETFERFFGALISGAEIKKTKSYLYSIAGNIIKNNYKKKKEIMTDQLPDIEDENPKNIEIRIDIERALEQLPEEIKEIVILFFFQGLKQKEIADLLNIKLSLVKYRVSKAKELLAKQLEVEKLMFFHFVKYKLDTIKLKTKLFAGSKRGTLFAAFLRAVSYIAIQDEIPMINSFNLFRREADISFGWNLPMIFKRKVYAKLIEWKTLAAGTSAVLLEGARRIGKSTIVEEFAKKEYDDYMILDFARENQDVKNNFVENMNDLDTFFRNLFLLKGKSLKGKNCVIIFDEVQLFPQARQAIKYLVADGRYEYIETGSLISIRKNVKDILIPSEEYRIKMYPMDFEEYLWAINDEVTIPTIREAFEKRKPLGDAIHRRIMKSFRTYMVVGGMPQAVDAYVSGKSYEQIDFVKRNILSLYEEDLAKYDTENREKASVIYRTIPEQLENKNSHFKLSMVDKNARYQNYMDAVSFISEAMIGNECINVTKPEVALELFADRSNFKLYMGDTGLLVTQIMKNRDSIDEDLYKALIIDNLGINQGMIVENIVAQMLRAAGHELYFHEYLYVPEGTTREKKYEIDFMIVKKKKICPIEVKSSNYMSHKSFDYLLQKYQLKCENRFIIYTKDLKYQDGIMYIPIYMTMLLMNKKKIILLFILTLIGILCVFLNGKEEPGIGGGQNKVSFSNKTNSFYYDQLDETEKRVCNDITALVAQGNGGKIDLTAPISTYRYLRIVRTLSFDPEYQNWAISLIFPVGENNKLIDRNTINDDCNIMKLYVLVNDSKKRKELKNFKLVLNDENIITNIDELEKICKSADFSTEYYQEKSKEIDACYDEIIREMPKNMNEKEAVQYFLNWIKDNMEYDYSVYESSIEPYYDKLYENEVYADVSNKGCILDKRGICGGISIILSELCNRVGITAYPVFGTIKSDGTLIPHGWVAMRVDDSTYYIDPTYVCQTGEMDNLKMKNEMERIGDRQYQLEDSFEYMGVLNLLDINLAKMKGPKEMKKCILVWQVPVIEGEPYNPVEYAVHVRKAKKFAEALNRYFAEKNMDYNCVLDKSACSLDEIFSPQYQAVLFAPEAKTRQWLYKKEVQNETVKKYYLEYMEYNSAQVEKVAEFLSEMGFIYKKYKNIWINISIHGTWNLIGAGMILTKIMLTKMELNRTMILLSGCFLIVWSTFKWKMPHVIWDVKLTRVCSAILGLYNIILAICFEKDLSIFLFIVDLILYMLLDIGFLMVKLKKDKKGKVKNFQLGICSIFVILAMIMACFNLNEIYSSIMILSGMMMVISTPFQEMKSLRENSNNRMNYIIIFLISMIPLAELRVAIPTGIAMGVSVLPAYAICILENLLPMPFVYLFSHRLLEWGKNKKVIGKFFRFCIEKGKSAGRKLQDTAGRGLFIALVLFIGIPIPGTGAWTGILAASILRMDFKKSIMACLCGIMLAGVIMAISSIGVLNLLDINMVVVCIANRDTDNTVKASKFNKDVCINLGKNEEYKEMKKENNYISTEMNHKKLIVGVVIIHVCFMLIGASGIISTLKEKNIFYGLLINMIYQLTLIIMIGVAMKQYLITSFKKFKADRISVNIKRVLAGVGIAFLLSCITRIIEMTVCSNISVPANQSNVNGYFVDYPILAVIMSVIMGPFTEEIIYRGILFRFFSKYGELCAVLVTGFLFGTMHMLSSFGNTNILLFLCQWLDYFLSGIFLGFIYKKYKNIWINISIHGTWNLIGAVMILTKIMLAKMKKENNKWYIGWIIFPAWYLIGKKYIILPVIQSVFEAMSYSDAYLITNYLWNLIAIVILFSLYGTGILRDIKQIRQYDIKSIASGYIKSFAVIVLFTILGGIMQFILSSGNNEQSINEITLRMTMKEHYWAIMILSAFIGPILEELIFRWFIFSSINKRLIIKVIISSVLFGLMHFIPSIGAISLNELCLQAIQYVLAGIAFCLVYIKRGNVVFGIAAHMSINLMHNLMYLVNQMERLLLFCGVWIIIVPILFQNSYFEEHKKYTLSMQIIGFFAFLMGILHFFNIVKKGHYLDVVLFCVLFVWVGKLSYDKIKNENAKIIRTACCISITLEILSLVIVVQDIREVVSAIVILTCSLIALSVFQKRNIAEMTKYYCIKQHDITDCGAACLATICRQNGYKIGISKIREVAGTGAGLGYLATRMNKKVGLPMGVAVGTAIGVAISVVTNNIVMLPIGTSFGCALGIALGSKSDKKDMDNFKRLSMQELYDVEGGIFGVDDAIFWTLVAAGFAGGIATGVSRKNRKEQCYEMCIKEYSEYAKINKGIAPVFIYTGALLGGWALGHIVGYFAGMESIINQKQKFITTKEDKLNHGIGLENVRRTVKKYDGDMRISMSTLKTPFRYDFVGSFLRPEKLKAAKKAFEEGTITQEELDRVTDACVTEIVAKQKVAGYHVITDGEFRRKFWHLDFMWGFEGVTHEKDGGGIQFNGEMADLEATYLVGKVKAKVHPFVEYFKFLKQFEDEQTVAKYTIPAPAQMYQQMIVPQNIEQTRKFYATDDELIEDIGKAYQDVIKQFYEAGCRNLQLDDCTWGAIVGDAAKQRYQSLGVDIEEVKARLLKVNNLALEGRPEDMVITSHICRGNYHSTFFTSGPYDSVADYVFAQEHVDALLLEYDDARSGGFAPLAKVSPDKKVVLGLITTKKPELEDKDKVIARIHEAEKYIPLERLCLSPQCGFASCEIGNKITEEQQWAKLALVKEIAEEVWKMEVKYYVCNHCGNIIEMVKDKGVPVICCGEAMHELKAGVTDAAVEKHVPVYTIEGSHVHVVVGETKHPMLEEHFIEWITLNTNQGIYRKQLTPGQEPVADFSLCDGEQVEEVYAYCNLHGLWKCMDRKAMYKLSYGLFVLTAREDEKDNGCIINTAIQAASEPNQLSICVNKANYTHDMIVRTGKFTVSVLSQNAQFELFKHFGFQSGRDTNKFETFEKCSRGENGIYYITEGTNAYISVTVNKTEDLGSHTMFIGEITDMEVISNIPSATYDYYQNNIKPKPQEVGKTEDGQIIWRCRICGYEYVGEELPDDFICPLCKHPASDFEKVVKKTEVKEMAENKYAGTQTEKNLQEAFAGESQARNKYTYFASVAKKEGYEQMSALFLKTADNEKEHAKMWFKELAGIGDTKENLAAAAEGENYEWTDMYDGFAKTAEEEGFPELAAKFRAVGEIEKHHEERYRALLKNIETSQVFEKSEVKVWECRNCGHIVVGTKAPDVCPVCNHPQSYFEVHEENYMRGVETRIQEIRHKIFTEVARMAYHTEWPVKERMEALPYKIIPGEKGNFRNDVFLERAIVGERLRLAMGLPYRSAAEHSPISDGIEAADKDETYYTPPLINVIKFACNACPEKRVHVTDGCQGCLAHPCMEVCPKDAISLDRTTGKSIIDQEKCIKCGRCASVCSYNAIIVQERPCAKACGMDAISSDENGKANIDYDKCVSCGQCLVNCPFGAIADKSQIFQTIRAIQSGEKVYAAVAPAFVGQFGPKVTPGKLRAAMKALGFADVFEVAIGADLCAKQEAEDFLKEVPDELPFMATSCCPAWSVMAKKLFPEHAKCISMALTPMTLTARLIKQHNPDARVVFIGPCAAKKLEAMRRSVRSEVDFVLTFEEMTGIFSAKHVDLENIEEDPAGVSDASTDGRNFAVAGGVAQAVVNVIKRDHPDQEVKVANAEGLKECRQLLKLATLGKYPGYLLEGMACPGGCVAGAGTMQAIKKSQTSVGLYAKQSTHKTSSETEYIKELDKLVDMKIILSPAKKMIVNTDNLAPVELPVYIDKTAEVLNWMKSKSKEELKAIWKCNDKIAEQNFNRLENMDLYNRLTPAVLSYEGIAFQYMAPSVFENSQFEYVQNHLRILSAFYGVLKPMDGVTPYRLEMQAKVEIGDAKNLYEYWHDMLYRSVIDESRIIINLASKEYSKCIEKYLTPKDKYITISFCEQAGNKLVTKGTYAKMARGEMVRFMAENDIENPDDIKKFDRLGYIFRSDLSSDSKYVFERKIAMLELGIKAPDFELPDQNGEMHKLSDYAGKKVILYFYPKDNTPGCTKQACGFSERYPQFTEKGAVILGVSKDSVASHKRFEEKYGLAFTLLADPERKVIEAYDVWKEKKNYGKVSMGVVRTTYLIDEQGIIIKANDKVKAADDPENMLKELAMKAHKYWSIGAIVTMVGTFYTGYKGLKAAHKYFAFGSLICMIMAVYSGHKMISGNKRTRKQVENTKAEEMPRPVKCRKVCHFPNVLEFLPADDTEKKMPIVLTVDEYETIRLLDKKGYSQEQCAESMQIARTTVQRIYEIARKKIADALIDGHPLKIDGGDFIICDGQSSDCSFGGCYKHEIYQKYAVEKGEGIMRIAVTYENGQIFQHFGHTETFKIYDVEKGKVLHSEVVDTNGSGHGALAGVLNALNADVLICGGIGGGAQTALAAAGIKLFGGVSGDADKAVEAFINDTLDYNPDVKCSHHEHNHGEGQTCGEHGCGSHSCHMSFENYFPLWNDLNTAQKKLISDNLITQHVKKGTIIHNGNMDCTGLLLIKSGQLRTYILSNEGREITLYRLFDMDICLLSASCIIRSIQFEVTIEAEKDTDLWIIPAEIYKGIMKDSAPVANYTNELMATRFSDVMWLIEQIMWKSLDKRVASFLLEEASIEGTNELKITHETIANHLGSHREVITRMLRYFQGEDLVKLSRGKITILDSKRLETLQRSMNCGLPYYIGDVITDPEELTLQTPESFFKRFRINMKIHHEVISIHPECKTVSVKNLENGEIFEENYDKLILSPGGGFIGLELAENLRELGMDVTIVQRPKQLMNPFDPDMASMIHNEMRKHGIKLVLGYTVEGFKGKDNGVEVLLKDNPSLQADMVVLAIGVTPDTVLAKEAGLELGIKESIVVNDRMETSVPDIYAAGDAVQVKHYVTGNDALISLAGPANKQGRIIADNICGGDSRYLGSQGSSVIKVFDMTAATTGINETNAKKSGLEVDTVILSPMSHAGYYPGGKVMTMKVIFEKESYRLLGAQIIGYEGVDKRIDVLATAIHAGLNATQLKDLDLAYAPPYSSAKDPVNMAGFMIDNIAKGTLKQWHLEDMDKISKDKDVVLLDVRTVGEFSMGHIDGFKNIPVDELRERISEIEKGKPVYLICQSGLRSYIASRILEGNGYETYNFSGGFRFYDAVVNDRALIERAYACGMDYMSAININKNNFENEVLNSDKTVLLDFWASWCAPCRRVVPIVEEIADERRDIKVGKINVDEEPELANKFSIMSIPTLVVMKNGKIVQQVSGARPKNAILEMLMRLKDKVAIITGGSRGIGFATADKFLKEGASVVLAASSQESADVAVDKLKEKYPNAIVAGISPNLASMESVRKAFKEATEKYGCVDILVNNAGISENTSFMDYTEETFDKVIDLNVKGVFNTTRVAAECMVARGKGVILSTSSMVSISGQPSGVAYPASKFAVNGLTVSLARELGPKGIRVNAVAPGITETDMMKAVPKEVIEPMIERIPLRRLGQPEDIANAFVFLASNEASYITGVILSVDGMARSMKHKAADERDCGCAVPLQRMPAERKKQTFKVSEYQSRYIVSSKIEREIFSYSGVGILHELTPEEMEEAFKHHLTERNKEKTAMQNNASQGVVWVEGIEHPTFSWDLTNRLADYTAVNVALDKVPQDISVYTDETVSVLKQAIDSVDTLLSAAEQSKVDAMAQAIEDAITVLQYKDADYTKVDAAIAKANALNKDNYKDFTGVEAAVKAVVRGKNITEQSEVDKMAKAIEDAIAALEKKPASTKPGTSDKSPQTGDSSNLVLWISLLFASGGAAIGTTVVSRKKKYNRMVSSDLSSAEKEYTAVIAHLTGTPTVADCFYKESDNGYHVITKLDKGSLAIDTSFDPTPCAKAITDFTDNDILVMINFLNDIRNAENPISNNRKLINTIAILFLGIALGTFSKYLDFRQTELPGVLMAINGVLDIGNFLGRFAIWILIALCISIYSNSAIRASINVFVFFVGMVASYYLYSNYIAGFFPRSYAMIWFGFTAVSPLLAFVCWYAKGKSKLAFILSALILAVLFNMCFVYGCWYFNAKSVLEVIVFIIGLIVLRRDTLRSSALMGTISIVLAVLLDMVIPFHFGMKNDEPEIKPAYKNPLMEHYECDGQINMFRYLDKMKKEDMSCIDCAVKNCNKMDKTYPDFCLTTHMDEEVLNEAMECYNEDENRKVTIAAAEVEYENYCKHTRVEEIMDFAKKINAKKIGIATCVGLLKESRILADILRRHGFEVYGVGCKAGTQKKTSVGIPECCEGVGVNMCNPILQAKLLNKAKTDLNVVVGLCVGHDSLFYKYSEALTTTAVTKDRVLGHNPVAALYTADSYYSKLKKSEEFRGKYMAELKQLWENDRLEFHGSAAPYKNYYTFKELLNTCYAKEWIPYCKKPFDGAESVIRYLGKYTHMKKSLRMTEGSISQKIIFFAIPLFLGNLFQQLYNTADSLIVGNFLGSNALAAVSSSGNLIFLMVGFINGIAMGAGVVIARYYGAKKRDCLQKAIHTTVAFGLVAGAVLTVLGMFLAPKILVLMGTPADVLPESIVYFRTYFAGSMGVVMYNIFVGVLQSVGDGRHPLIYLIISSCVNVVLDIFFIAGLGMGVGSAALATAISQFVSALLCMVHLLRVEEEYRLELREIRFDSSMLKQIIQNGVPSGFQNSVIAIANVFVQSNINAFGKMAMAGCGSYSKIEGFAFLPVTCFTMALTTFVSQNLGAKQYDRAKKGARFGVFCSITIAELIGIIIYVAAPVLITAFNRDPDVVHYGVMQSRTIALFYCLLAFSHCIAAILRGSGNASVPMIVMLCDWCLFRVSYITVAVRILPDIRVIFWAYPLTWGISSVIFLYLFLRGKWVYGFEKSMADIIYTYKNEVYANITNKCDCACTFCIRSQKDAIGDATSLWHTVDPTYDEIIAAINAFDFTGYEEFVFCGYGEPTCALDILEKTAKYVKAKYKLPIRVNTNGLGNLYHGRDIVPELAEYIDSVSISLNAANAEEYNKVTRPTFDNAYEAMLDFAEECNRMIKHTQLSIVDVLPEEDIKTCQQIADERGIHLKIRHFSNMNSQVKKLTFTALMAAMITIFTAYICHIPVGQNGGYIHFGDSLIYIAACLLPWPYAMTAAAIGGGMADLLTAPIWAPATIIIKALISIPFTSKSDKIMTVRNVVSTIIAFAISATGYAIAEAFITYSFTKQAFTGLIAIIPVSVPGSCIQSGGSAIIFVILGLVLDKIGFKRRFFTLEETKMKKAAVFNDLSGFGKCSLTAAIPVLSAQGVQCCPMASAVLTNQTGYEYHKCTDLTAMIKDYIYNWQKNNAHFDGIYSGFMTSSKQIELFMDFLDVFYEENTMLLVDPVMGDDGRTYGIYSAALLDGMKALSRKADVITPNLTEACLLADYDIEKVYSDTRKDVLLPLATEISEKLRSLSGKNQDVIITGIKCRDDKAPFIYNLVTTANGTTTHRSHFFDVSFSGTGDLFASVICGSRLNGFSTEEAAERAGKFLYDSIADTMNDDTAPNDGVNFEKFLRELMMFQKKQIIYSETLGVCVVDNIVSLAASKREKPVLYYVLKPVFEDKVSYIPVEHHRVVLRDMFTGEEALKLKETEQYEKDKHLRQAVDYVLDKVAIKMGQQHAIHKFVLGTKDFDDKQSEFMYDKGWYSITDIVGEEKNIIYKSRNAQEAYLKWNIYIGRKKERLTPEERKRQREERYEKKREQNREHHRIMGIFNIDNKFFRALNKLVDMVILSFCWIISCIPVFTIGAASTALYDTSRRVIHHDEGYVWRGYWHAFKVNFKQATKAWLVQLIILIVLLEDIYITWSGLKTGNKWGAFSIVFIIMALIAAAWAIYTSAYISRFEQVTKITLKNTILILIANLPWTLLVIVILVVSLILVWILIPLIFILPVGAALTYEFIFERIFRKLMPEEDRLREEEKDKEYRDMKKIGMLTSGGDCQALNAAMRGVVKALAHNIDELEIYGFENGYKGLIYENYRILTSKDFSGILTKGGTILGSSRQPFKLMRVPDENGLDKVAAMKNTYKKLGLDCLVILGGNGTQKTANLLREEGLNVIHLPKTIDNDIYGTDVTFGFQSAINIATDAIDCIHTTAASHNRVFIVEVMGHKVGWLTLYAGVAGGADIILLPEIPYDIDKVVDAIHKRTKEGKGFTILAVAEGAISKEDAALSKKEYKKKLAKSKYPSVSYEVADRISERLGLEVRVAVPGHTQRGGSPCPYDRVLCTRLGSAAAKAIMDEDYGCMIAMVNGQTKRVPLADVAGKLKTVDPKSQMIKEAKRTGICFGDMSYQALYRKFRPQEFEDVKGQEHIVTTLKNQIKADRIGHAYLFCGTRGTGKTTVAKIFAKAVNCEHPVDGSPCGECPSCRAITEGSSMNVIEIDAASNNGVDNIRQIREEVTYRPTEGRYKVYIIDEVHMLSAGAFNALLKTLEEPPSYVIFILATTEAHKIPITILSRCQRYDFHRISIDTIASRLSDLMEQEQVEVEERAIRYVAKAGDGSMRDALSLLDQCIAFHLGEKLTYENVLEVLGAVDTEVFSRLLRRILDEDVTGAIRILGELIDEGRELSQLVNDFTWYMRNLLLLQSSDDMEEVLDISKDNLEALKEEAALVKPETLIRYIRVFSELSSQVKFASQKRIMVEIAIIKLCRPQMEKSYDSLLDRINSIEKKLEKGIPVAAQAAQTQDMQQAAASGPIVKKELPKAIPQDISELMKHWKSILSEMGATSKVYLNKAVTSLGNSSDLILMFDDENAYEYLSENRAGCMDTLASLIEKRIGKKVEVTVKKNNSAVSAKEAVVDLTDMINFDIEEENMARRGGFPGGMPGNMNNLMKQAQKMQRQMEEAQKQLEDAEVTAKAGGGAVEVTVSGKKEITKVKLSEEVVDPDDIEMLEDLIMAATNEALRQIDEQSQASMSKITGGLGGGLFMDFYSSEISKLIEELSQLPGIGAKTAQRLAFHIINMPKEQAKSLSDAIIDAKEHVRYCKCCYTLTDDELCPICKDAARDHKTIMVVENTRDLVAYEKTGKYEGVYHVLGGAISPMLGIGPADIRLKELMVRLEKDVDEVIIATNSSLEGETTAMYISKLIKPTGIKVTRIASGVPVGGDLEYIDEVTLLRALQGRTEIMNNLELEKMANEIRKDIVTAVHSAKSGHPGGSLSSADIFTYLYFEEMNVDPANPKWEDRDRFVLSKGHVAPGLYSTLAEKGYFPKEDLKTLRHTGSYLQGHPDMKHIPGIDMSSGSLGQGVSVAVGMAAAGKYDKKDYRVYTLTGDGEIQEGQIWEAAMWAGHRKLDNLVVIVDNNNLQIDGSVEDVCSPYPIDKKFEAFNFHVINIDGNDFDQIRAAFKEARETKGMPTAIIAKTVKGKGVSFMENAAGWHGKAPNDEEYEIAMADLEKAGEALCQKMSEVKKIATRDSYGNALVELGKAHDDLIVLDADLAGATKTCIFQKEFPERHWDCGIAECNMTGIAAGLATCGKVPFISSFAMFAAGRNYEQVRNSIGYPHLNVKIGATHAGISVGEDGATHQCLEDLSLMREIPGMVVINPSDDVEARAAVKAAYDHVGPVYLRFGRLAVPVINDTPDYKFEIGKGIVLKEGKDVSIFATGLEVSETLEAAKMLAADGIDAEVINIHTIKPIDRELIVKSVSKTGKAVTVEEHSINGGLGSAVAEVLCEEQPAKLLRIGVEDRFGESGPAVELIHKYGLDAEGIYNKVKNYMKMIDIVTNNVRQIGTPADEGRVYISEKAYKRIKTEGFKDKEVFVLMGHTESSGGRYATFVEAAIAVYDMEFDKNAPLWTNKVWSRVFAEIKKSYEELIIVGWAFRQEDFPAEPTPMLENIHREHFGGAHQLMFLLNRNEQEENFFIKKNNHLKKKTGFFVYYRMNEHCDSADSYNETDTCNKTYGYSNANNNNKIDSYSNADDNNKSSSRYEDTDTAAKSSYSRIHRRASADDSINVSFPEEFGSISKERGRYRKAMEAGKEERKGSFASVVMIAAIAVLIVLIGLKAGAGMSGTIDKKETLPAMSTEEDLIPVEKISGEWYTDKMAQKSDFKTVETDLDELEEKIRKHRRKIAKRIIIVVAAVVALFLIVWLWMALRTYKSFDVKNSVEQKDKSAVSFVDFCGAVVEYSNDGVLYTDSDGNRIWNQAFEMSSPQVVTCESFMTIYDRGGTDLYIMDKNGVKKEIGTSWPIIKACIASQGTVAVLVSENENYYVKLYDVNGKELASGEFFGEQKNIPVDIALSYDAKKLAVDMIDVSRGKTDSVISFYNFGSVGQNEIDNNVGTYKYENQLIPEIAYVSDSRMIAVSDQNIMVFDGSQKPKLKQTIKLEKLIDSVFYNNKYIGVAYSNNDKNCTSHIKLYDFNGKMLMENGTAIAYNSIEFDSNNEVCVTGDTACEIYTIHGVKKFYHTFDNKLYKVMYKSGMNNYIFIYDGAMDEVRLKMNWLLIAVICIIAWNVVRGYTRGVLRMVYSLAAWIVMLAASTMAAPYVRDQILSQTGIEPVILNGIEKQIAAQGQKATGDFDMANILLQQSRAYDTISAQLTNAIMTGLSFFIVFFLLGIVAYIVRHIIRKIERVPVIGTVNRIAGFAVGFIKGMVIVWLLLALTSLFAASEIGRTMTAYINDSMMLKYLYENNPVIKLIENILMTESLKLPVGIESFEEIRSDGYYYVDKTKLIEQLVDSRGKVNLFTRPRRFGKTLNMSMLKSFFEIGAASELFDGLYISHNKKMCDDNMGKYPVIFLSLKNVEGLDFQAAKYQMIEIIAKEAKRFVYLKNSDRLDIDDKSTYASLIRLEDGRYEMRDEALYASLQTLSELLYKHHGRKTVILIDEYDVPLDKAFQNGYYKEMVSLIRAIFGKALKTNEALDFAVLTGCLRVSKESIFTGLNNFKILSITDTRFDEHFGFTDDEVERLLAFYHVENRFAETKEWYDGYHFGNVDVYCPWDVINHVDRIKDDPMAGPEAYWINTSGNELVKRFIDKAGKTTRDEIERLIAGEAIDKQIRLDMTYDEIDNNIDNLWSVLFTTGYLTYTKISEDKKYSLVIPNKEIKEVFKLQIQEWFRNKIFSNTEQLQDFWKAFKDGNTQIMEMYLNKVLSNSVSVFDTRARNDEKESSYHNLLIGILSGNEDWLVKSNVEAGEGFADIIVETDDPDEGIIAELKYTKDFKSMEKSCEKALKQIKDRRYQEYLLNDDRQNIMYYGITFCRKRCKVLVERMETNFDYLLKKEEYADFAKQAVEAEKSLSISPATCAILSRRALELAVRFVFSYDAELSLPYRDNVSSLIHEPTFRRIIEPRLFPMLKYTIHLGNVAVHTNNNIGRDEAIIALRDLFEFCDWIDYSYSREYDEKTYDESILASGNEKRIKADELMKLYEGLSSKDKKLESVLKENEELREQMAKKRSQNVKTREFHVDTISEAETRKRYIDVALKEAGWVIGRNVTEEEPVTGMPNSTGTGYVDYVLWGKDNLPLAVVEAKKASVDAMVGSQQAKLYADCLQNKYNRRPLIFITNGFEFFYTNDYMGYPRREVSGFFTQEELQLEMDGRTSRIPLENIRISDDITNRPYQKEAVTAVCDAITNKHRKMLIVQATGSGKTRVSISIVDVLRRHNYVKNILFLADRKALVKQAKNNYTNLLPDLSCCNLLDNKEDPESCRMIFSTYPTMMNAIDERKNKYGEKLFSPGHFQLIICDEVHRSIYKKYQEIFEYFDAMLLGMTATPKNEIDKNTYGVFDLERGVPTFAYELEKAVEEGYLVNYSTLEYKSKIMESGIHYDELSDEEKEEYEDTFSDDDTVGDDISGEAVNTWLFNADTIDKVLRELMEKGLKIEGGDKLGKTIIFAKNSLHAQAIVKRFNKLFPEYGGDFIKRIDYSIKYNDSLIDEFSTSDKMPQIAVSVDMLDTGIDIPEILNLVFFKKVKSYAKFWQMIGRGTRLCPNLLGEGMDKERFLIFDFCNNFEYFRVNKNGAENGITESLNEKIYNTKAQIVRELQAPVYSGDEIYADYRKSLVDDLKKDVISLNDDSFMVKRHLRYVEFFRASSSWDNLETIEISDIREHIAPLIRPKKEDELARRFDYLVYSIDLGLLQSKSIQSPVNIVVQTAEKLSAKYSIPQVEKKKEIIEKVQTNEFWDKVTIIELDTVREALRGLLQYLDRQVRPIYYTNFTDSITDGTPGEPLYGGNDLKNYRKKVEFYLKEHIDKLSVYKLKNNKKLTETDLRELERILWTELGSKEDYIKEYGETPIGRLVRKIVGVDRAAVNEAFSCFMSEERLNINQMRFVNLIVDYIVANGNIEDNKVLMGEPFKSVGSITTLFKDDMSTAKQIMEIVNQIKRNSEEIAMAKKILVVVDAQNDFITGALGNKECDVATNVIAEEIRSGKYDDVIFTRDTHDENYLNTQEGKKLPVTHCIKWTNGWEVDARLKDAMKERGVNCDDITYIDKPTFGSKELGGLLAEYDNSDTEIYFCGFCTGICVISNVAIAKTFCKDAEVFVIENACACVTPESHKTAIEAMKMIQVGIKGTPSCMPGPRGPRGPKPKIKNPGKLFARLMGFIFKKYLPACIIVVICIFVSVLANVQGTMFTKNLIDDYIVPLLKTGNPNYGPLLAAMGRVAVFYGIGVISTFAYSKIMIYVSQGTIKNLRVELFSHMQDLPIRYFDSHAHGDIMSIYTNDIDTLRQLISQSLPQILNSAITVVSVFVSMVILNIPLTVLTIVMVIVTTVVTKKFAGFSSRYFLAQQRDLGKVNGFIEEMLNGQKVVKVFTHEQENIEAFDKINDELFESAYNANMYSNMLGPVNAQIGNLSYVLCALAGGVMALSGFGGLTLGKLASFLTFNKSFNMPISQVSQQFNSIIMALAGCDRIFSLLDETPETDEGYVSLVNAKEENGKLTETPEHTGLWAWKHTHQADGSVDYKKLEGDVVFDDVDFGYVPEKIVLHDVDLFATPGQKIAFVGTTGAGKTTITNLINRFYDIADGKIRYDGININKIKKADLRHSLGIVLQDTHLFTATVMENIRYGKLDATDDEVYAAARLANADTFIRQLPDGYNTVLTGDGANLSQGQRQLLAIARAAIADPPVLILDEATSSIDTRTERIVQDGMDKLMHGRTTFVIAHRLSTVRNSDCIMVLEQGRIIERGSHDELIAKKGKYYQLYTGKTAMLKTLGAQIKEYKWASIATPVFMLLEVAVDTIIPLLMASIIDNGVNMGDTRHIYIMGVWMIVAALFGLLTGCLGAKYGAKAAMGFGKNLRAAMFRNIQTFSFANIDRFSSASLVTRMTTDVTNIQNAYMMLLRMAMRAPASIICAMAMSFFISPRLATIYLIAVIVLGALLLFISKAAMKYFDRAFKRYDDLNESVQENVSAIRVVKAYVREDYEKKRFSKAAQNIYDVFVKAESLVVYNSPLMQFTVYACILLISWLGAHMVVSSTLTTGDLMALLTYCMNILMNLMMLSMVFVMISLSLASARRISEVLNEQSTLHNPKEPLYDVPDGSISFKHVTFRYSDTAETPVLSDINLDIKSGETIGIIGGTGSSKSSLVNLISRLYDTDTGSVIVGGHDVREYDMDTLRNKVAVVLQQNVLFSGTILENLRWGDKNATTDECIEACKMACADDFIDSFPDKYNTYIEQGGTNVSGGQKQRLCIARALLKKPRILILDDSTSAVDTATDSKIRAALAKTIPGTTKLIIAQRISSVMDADRIIVMNDGKVDGFDTHENLLKNNEIYRDVYDSQTNGGGDFDEGGAAMKEFTPDKYLGHKINRISRSIDRYFDRKRCSKTECIPRSQGMMIGYIMDNQDQNIFQKDIEAKFHLSGATVTNMLKSLEKNGYIVRTPMENDARLKRIELTKKALDHENRVRENIMVIEEAMHEGFSKEEFNMMLGFLDRVIDNMEKLNNMKIIKRSGSEDIFDAAKIVAAIRKANNSVLDYEKLTADQIEEIASNVETACENMKRSPSVEEIQDMVENQLMNKRAFTVARNYITYRYKRAIVRKSNSTDQQILSLLECNNEEVKQENSNKNPTVNSVQRDYMAGEVSKDITRRFLLPEDIVEAHEKGLIHFHDADYFAQHMHNCCLVNLEDMLQNGTVISETMIDTPKSFSTACNIATQAIAQIASSQYGGQSISLAHLAPFVQVSREKFRKQVLKEFESVGLDLDEEKINEVAELRVKEEINRGVQMIQYQVITLMTTNGQAPFITVFMYLNEVSDPQTKADLAAIIEEMLHQRIKGVKNEKGVYITPAFPKLIYVLEDDNITEDSKYWNLTVLAAQCSAKRMVPDYISEKVMKELKDGDVYTCMGCRSFLTVDRCSQTAGNVAHAKNFDPNKRKYYGRFNQGVVTLNLVDVACSSEKDEEKFWKILDERLELCHRALMCRHKRLLGTKSDVAPILWQNGALARLKKGEVIDPLLFNGYSTISLGYAGLCECVRYMKGVSHTEPKEGTPFALKVMQRLNDACEQWKKESNIDFSIYGTPLESTTYKFAKCLQKRFGIIEGVTDKNYITNSYHVHVTEQINAFDKLKFESQFQKLSPGGAISYVEVPNMQDNIPAVLSVMQYIYDNIMYAELNTKSDYCQVCGYDGEIKIVEEEGSGKLIWECPHCGNRDQNKMSVARRTCGYIGTQFWNQGRTQEIKERVLHLMKTSEIIVFIVYLLCMLGIGIFFFVKNRNGGEKTYFLGGREMGPWVAALSAGASDMSAWVLMGLPTSIYALGLGQVWIPVGLAIGYTISWLLEAPRLRKFSIVANDSITIPQYLTNRFLSKSLALQVICAIVFLVAYTIYAASSVKACGTLFHTVIGMDPQIAMYLAAVVIVGYTFLGGFSAVCWTDFFQGMLVLGSMFIAPIFAAFMLDTSSTSALPGGYLNPFSSWQDIVSGLAWGLGYFGMPHIIIRFMSIKSQKDLKKSAKIGITWTLLIVFFATLIGVIGRLFLGFDESINENSLVFIQIVRKIFPGVISGILLSAVLAASMSTADSQLLAASSAFSSDVYKPVIRKGKASDKEMMWTGRIVVLGIAVAALIIASNPNAGSIMALVSNAWGIFGAAFGPAIMLSLFWKRFNFKGAVAGIITGAAVDILWYAFLTSTGIYELLPGFVFGLIAAVVVTLCTNEPSKEVYELFDKAQKFDEMKNKIAVAILLTVALAVTGCGSGGSDATENTTASQEGINSDLKSANESSQEVFAMDTYMTVTAYGKNAKKAVDASIEEIKRLDALLSTGDEDSEIAKLNVNKSATLSEDGGYLVQRGIELSTMTDGAFDIAIYPVMQEWGFPTKDFKVPDDATLKELLKLADVSKIDYDNKSREISFEDAGMEIDLGGIAKGYTSSRIMDIFKEYDVDSGLVNLGGNVQTYRTKTDGSKWRVAVQSPEDESQYIGVVDVSDKAVITSGGYERYFEQDGKIYHHIIDPATGYPAESGLKSVTIVSDDGTLADGLSTLLFIMGKDKACEFWKAHSDEFDFVLLTDDDSMYISEGIADDYSSDYEYEVINAKMKFKEVLEKIKVYAPLGVSLVIAACVVISLSGYQTKASEPSKDKKHQVSERVTDTETENAAEDTQTATGSFELADGVYKGSATGFSGHVTVAVTIMDKKITSIDILSSTDDEAFFNRAKAVIDRIIASQSFDVDVVSGATYSSNGIIGAVKNALTGEKDNGVTGKSKQGSTSESESDSSLAEIAAVQDASAYKDGTYYGTGKGFAGTMKVKVDISGGKIASISIVSTKDGDSYVKIASSLLDTIVEKQSTNVDTVSGATFSSRGIIAAVRSALSQAAVSDNTTGNNTDKQGAAEVSGNGQTDENSSGSASEQGTEGTLPYVDGIYYGTAEGYKGDIRVAVVIQDKTLKAILVTEKQDDEPFITNAMDVLKNMMKKQSADVDTVSGATYSSKGLIGAVKAAFEEARKTTAGENTGGSNSDSNNSNDNNSNIAGEEDKAVLLKLVQSQASLDGAQYTQLSWYLLQIRLGDAQEVLESAESTKKDVSCAQEKLQAAINALQKNDTSTNVYEDGTYDVSTLCIPDDDMDFSAYNLSMKVTIANDRIVSITDVKGDGDSQNVSYIKKAVDGTKNQAGMVSVLTSQTNADSIDFSSIDTVSHATCTSKAIIDGCKSALEAAKKKMQEFWIRLVSLFIVVSSLWGYNMTIDKREQENKNTQYIAAETESTDSQGAYKDGTYTGSAEGFGGNVDVKVTIEAGKISSVDITAAEKEDGAYLAMAEDIIPSIISAQSADVDTVSGATFSSTAIRNATKQALDKAVKMRIKDMNPKLRKRKIQTWFRAGMQLLFFILFPSMFTAAFNGVKYIFTQIGSGNRIELTSFVAVLLMLCVYTMIFGRFFCGFACAFGSFGDAMHALYVSCCRKLNKKPVSIPAKAAKKLTYMKYVILTIILILCYLGVYSSLKGTSPWDVFSMLRAGNLGLASYITGAVVLVLIIIGMCVQERFFCRFMCPMGAVFSILPIAATFTLHRDRAGCIKGCGACEKICPCDIGLPDDGSGRISGDCFQCQKCNGICPKSNIHTGIKQLRGNELWFTGIRAAILIAICIWLGVMKRNMTKSGKIAYGAMLVALAMIFSYVESLIPITIGIPGIKLGVANLVTVLGIFFLGPCEVLTVVIMRIFLVGFMFGNGVSIIYSLAGGLLSLTVMLIIKKTDKFSMVSVSVAGGISHNIGQLLAAAIVLKSTAVGYYLPPLLVAGTLTGLLIGIVAQKVFPAVGISGKNFLNAGMKRKILAQKFLTFALTASVTATMFPTSAFAVTGSQVAADGTYSSTAHVTRTEEDTDDEWDEYDVNVKLTVKDGKFSDITVSPENGYDSDNDSYFNKAYNKSKGIKTKLEGQAATEETINSWDTVSGATRTSTAVKKAALEAIQSASAKEESKPEEEKYVYCYAGLTWAEYWAAEGVQAAGSTASSSEKDSHNESDKGAFDTVTRATANHGLHRGSFQCNAIVETEEGTTLNLSYWKTGENNQQIAVMTDGTEYNYNKGVFTKDGTTLKLKDYKVTGLKFVPVKVKESDYEAFKAKYTVYENGADLKGGFGEGNLNTIDEIADVTENTNGLKTVTKNADGSFSFSARATGTDSGVKDTSLKKADVTGAVKDASGSYGEFLRVDFNGNYGDLGANMQAVKWTYYGNDSTRTKALATYGTKFASDNWMHKSMGIQLGLTDSLRCSLPSGYDGTGYWSVTIYALGYEDYTYNFEATAANIVTPQVPADETSKKALSDKVSEADKLNQELYTDKTWSNMQIELKEAKDALAKTDLMQSEAKEALSHLTDAVNNLKSQYVLMNIPYDEFYKADLNNNSVAVDATTSATKQKTRNTLAAGSYHADSEGEHINGVTFPVKVTDDFYDNNKDYTQITDDSKVDITTNIKGKVSTTTYEGKKALFESADYSYYVLSEIPSYYKTATVGADNKLSFGAVNGTKTQIAADKVTTKFKTKTKYGDYQLNLDGIKDAMGFEDDDVVYGVIVSTDDNTDYAMRHVENIWKTEELAWSVGIVTDSHGCPLSSEHYKSMVGKTIKNVTYYTSKGIFTLPVDYKVLEHAKDAAVEAENAAVSAGKANLDVTLPDDFNAEYAVTDAKGNEVKGFKVTEENLASAVSTYAASYTQTNKLVITYPKDAENTEYTLTVSDKSNKYAPITTTFELYADAVSAAYNNDATAPKLVVADGASAAQFADFIGKIKSVNVNGKDYPATGKGAVKLIKEDGTIDTTQAPFAEGSSFEIKVSATGYKDELSFTYEKPAVIETKALESVIEKADTLKEADYTADSWKTFSQVLSSAKAVLKQKDDQTKIDNAVASLNKAIEGLKKKEAVNPGTPGSGAGSSNGTGTNATVATGSKSNSTTTDTTGTAAKKATVKKASKTGDTNPLMGMLALAFASISLVGAALFAKKPNRKMIFVAILLLIAGFVALVKGADVFVDGAAALAGKFGIPQLVIGLTIVAMGTSLPEAAVSITAGIKGNAGITVGNIVGSNILNILIILGVTALITNVAIQKTTFKYEIPYMLLITAVLLVMGMTGNEITFIEGVILWILFIAYLLYLYILAKKGNDSGDEQSVKLYPVWKCLLFIVLGGVCVVIGSQFVVNGATTIARACGMSERFIGLTIVAFGTSLPELVTSVSAARKGNAGIAIGNIVGSNIFNILFVIGTVALICPVPFESRFVIDTVVAILCGVLLWGGTIRHKELRKPCGVVMLLCYAAYFVYLAAMMEIAFSEKISPQLSAALLSTPYELGKEGGLSSGYLPESDSWEVIVKYVGDIEKIKEKYPSVLITRLLGNYAVLVIEKSLVNTVALCDEIIYMEKPKQFNYDVYEGSHASCITPVHTNPYNLTGKSVLVGIIDSGIYYAHPAFIQDGVSRIAYLWDQTVSDDSSHSDIIPFGTLYDRDTITKAINAENSLEMQRICPSIDISGHGTHVAGIAAGNGNGNEQNTKYRGVAYESTLIIVKLKTSGGASFPTTTQIMLAVDFCIRKSIDMNMPIAINLSFGTSNGSHSGTSLLESYLDYIAGNYRCAVSVGSGNDGAGFGHANGISYPADAELAIGYPEPSLSIDLWKKYWDEIQLRISAPNNDMLEIPDTITNQAKGFTYRYNLDGTDIYITGGGPSPYSPFQEIFIELMGSEYISPGIWKISLEPISVKDGSWDIWLPSGALRNAQTSFIHASPDITLTIPSTAQNVISVGAYDSRTNRTAAFSGRGYTWAFDSIKPDIIAPGVDIISCSNTGGYTSKTGTSMAAPFVTGAAALLMEWGIVRGNDLYMYGDKLKASLIKGAGENVFTTASRAVSENTSKNTKYPNPVTGWGTLCLLDSIPMSKKKKIIISVIAAVLIIAVIVSAVVIAMTKGKNAAKASGVYANKVADVMYQAGSTDRYSGVVEAADTMDIKADSEKTVKDILVSEGDEVQVGTPLFTYDTKDLAAKKESATLELESLNNTLSGYDAQIEQLTKEKKEAPKDQQLDYTLQIQQAQTQQKQTQYDIATKKAEIEKYDESIKNATVNSTMVGVVKKINENQSADTADTAFMTIVATGDYRVKGTIDEQSFLNSGLAEGQAVIVRSRVDESKTWQGTISKVDTENPQTDNSNSGMYDDGSSEQKASKYNFYVQLTGTGDMLLGQHVYVEPDFGQTEVKDGIWIDESYVVKDGDDAYVWTLNKKDKLEKTKVELGDYDENLMMYEIKSGLTKDDYIVWASDDLYEGEPAQTWEEYVENGGGEDSVYDDMGTEALDDQMLEGTEGGPVDDGTMDEGAADATGSGDAEVQMILELQHIYKNYDQDKLVVPVLKDVSLQIDEGEYVAIMGPSGSGKTTLMNIVGCLDLPTSGTYILDGRPVSELKEKELTRVRRDTIGFVFQNFQLMPRESALDNVCLPLIYAGVSKKDRRQMGMEALERVGLSDRADFKPTQLSGGQKQRVAIARAMVNHPKLLLADEPTGALDSKSGKQVLELFESLNEFGVTVVVITHDRKVAEQAKRIVHIIDGEITEEGQEAGNEKEKENMKKKKRIKIIIIAVLVVAVAAGSITGVVYYRNSKGLASVMSVSMISTTNDYTSMTSGGMVCDDACQTINLKDGQKVTEVYVTKDQQVKAGDKLLAYDVTSLSLSVEMKQLEIQSLENQLASEKQKLDKLKNTKPVEKQPETPVTPEPQPDTQPSAPEQTPDEQHDVISDLSEAKGSGTEDDPYVFTCTEASYVSGKLLNTLSEKSAVARFVIGDADAPDMELIVRGDRLGGYDESDEIKLFLAGTTTAGDASDDTEGSEPSDTKTDSATEQTAQTEADTAAEEKTYTADELKDAIKEQTRSVADVDLQKRIAQADLKELQSELEDGVVYAKKDGIVTTVCDPANPPQDGTPFLQLSGASGLYISGTIGELDLDTVKVGQSVSAVNYMTGDTYEGTISEISNVPSDSVNYYGDSNPNSSFYEYTAYIENPQNLKKGDSLELTIDTSSEGSDSGLYIDKSYVRTENGQSYIYKDDNGKLKKQSVKTGKSLWGSYVEIKSGLTNDDYIAFPYGVREGEKTKVSEDGMYMLENIRLSFRGIWSHKMRSFLTMLGIIIGIAAIIAIVSTIQGTNEQIEKNLIGSGSNNVKVTLQKDGYDMDLSYDTAPAGVTEISATTLDSIKELDHVQNAALYRTRQASNAVYYLNTALSGGNITGVDDGYFDTASYVVMKGRGFSKNDYAKARRVALIDESVESSLFSGESALGKTVEIQGYPFTVVGVVTEKDSYDLVINSIDDYYMYAYDDSQGNVFVPSGTWPVIFGYDEPQNLLLKADSTDTMATVGKAAEEILNSNLNVTDGSDVAYKAQDLQEQAKQIQQLSQSTNMMLIWIAGISLLVGGIGVMNIMLVSVTERTSEIGLKKAIGAGKGAILGQFLTEAVVLTSLGGLVGVLVGVILSKVISMLNGTPTAISPAAAILAVLFSMAIGIIFGMLPSYKAANLNPIDALRHEMYADENVIKIKHAVLLEVAKAAFAGNLDEIRDDIPFTLIPGPTPQFRCCIYKEREIIRQRVRLAEGKAPSANDDGNIIQVISSACEDCPISSYTVTENCQNCLGKACINACKFGAIEAGRLRSHIDPQKCKECGRCAQACPYNAIAHLKRPCKFSCPVNAITYNEYGISVIDESKCIRCGKCIHSCPFGAIGSKTYIVDVIDAIKSENKHVYAMVAPAAEGQFGVNITMNSWKKAMQAVGFNGFVEVALGGDMTAAYEADEWLEAYEAGEKKVTSCCPGFVNMVRKHYPDLADKISTTVSPMCAVSRMIKAKDPDAVTVFIGPCVAKKSEVHDQKIEGNADYVLTFSEIRAIMKAKGVQLEADDTSYQEGSVFGKRFANSGGVTAAVIESMKEKGEDVDCKVCKANGAAECKKALLLMKAGKLPENFIEGMACEGGCVGGPSSYNDMVSTKKFRDDLLSRADDRKIRDNIANYHMETFEMHRKEQMDKNKKMIIGILTVAIVLVVAFIVYITCFDSHIEFSSKFKNGITVEYGKKFEPPKIKAYVRGRLINRKGKEIKCTIDSNVDATKIGSYEIKVIAQYGKKTATQTIKVEVRDKKAPEIALNGDAEMTVEAGSEFSDPGYTATDNYDGDLTDKVSVTGDVDTSKPGDYEIKYSVADSSKNEIEVKRTVHVTDTTAPQIKLSGDDFMSVKKGDKYKDPGYTATDNCDGDITDSVKVSGDKVDKDKAGKYTVTYEVSDSSGNKATATRVVSVYDPVATADTVNPGNKIIYLTFDDGPGKYTQGLLDVLDKYNVKVTFFVTNTHPDYQNLIAEEAKRGHTVAIHSASHKYDQIYTSEQAFFDDLEQMNSIIKAQTGNDASIIRFPGGSSNTVSKDYCPGIMTQLVNDVTARGLLYCDWNVSSGDANNKPISTEQVVQNVISGVQSHNVSVVLQHDIKDFSVNAVEQIIQWGQANGYTFLPLTTSSPMSHHRINNMSKGTVKWFNNQKGYGFITAEDGKDVFVHFSGLNMEGFKTLEEGASVEFDITDGAKGPQAVNVEVVKMISIELTDTKDFMNKLLRTEIFDNFLLQEAVITKAASYVIDGHLQKGFYSSTELEENGIAGYSILPFRMLRTNCFDLIKGRQTPSSFKFVFLLSPENMEHTLSSLHSAFTVSDISGFFINIRYQNKLLTLTTGISYNIFSVDKTLDGEWDKLVMKFLANNDINFKELMKQEKLFDLLKAAVSPCECVKAAKQELLENGFEEIDYTGDWKLVRGGRYVLNHHDTTMFAFTVGSGYNKKDMVRIAAAHTDYPYLRIKPNPDFMTNSYAQVNVEVYGGPILNTWFDRPLGVAGRVAIKSEDVFNPRMVLYRSEKPVMIIPNLAIHMNRDVNKGVGINNQVDLMPVLDSIPEDERTTDYFLSFLARELSVEKSDIIDFELNTFCMEEPCFVGVNDTMISSPRIDNQSSCRALLDAIEDGNRADGINIIALFDHEEIGSSSKQGAASIMLHDMLRRILRNMDLSENEIDESIYDAMLLSVDVAHALHPNKKEKMDITNKPVMGKGFCIKQACSQSYATDAQAIAILCQLCDEKGIPYQRFVNRSDSRGGSTLGSIAGTLLPVKTVDIGIPILAMHSACELMGVRDMKALSDCVTAFFGYHMYKIIIDSCGELTDSLKKDGHFCNVALELDVDGYRIRDDESFDQHDFLRRVKESVKGPKSSCPSPEEYMQAFEGEADHVYVVTLSGKLSGSYNSAVLAVNLYNEEHEDGGKQIYVFNSCSASIGETLIGMKVQELEESGLSFDEVVKQTEEYIASMNTFFVLETLDTLRKAGRLSNLKAFVAGTLNIKPVMGSTDEGSIQQLGQARGMKRALTKMVEDVVAATKDCEHRILAISHCNCPERAQYVKACLEKLARFKKIVIVDTAGISSMYANDGGIIIAVMGNLDYTQVLNKIENTRRFGNEPGVVVTAQVIKVLREKGKQKRTIPYIHVAGTNGKGSVCAFFSSILKKEHMRVGTFVSPHLVDFEERITVDGRMIPKEDVTRLGNYLLDIDFGIGLTMFDYCLAMALLYFEEQQCDYMVIETGLGGRLDSTNAIGKPQCAVITKIGYDHMAILGSDIADIAAEKAGIIKENGTVVVEQQDKRAMQVIEQEAKKKHARIITVEQSDIARCSGYALRLCGTFQWENAAAAELAARYVLGKRYGGPKYEMQYDKTESKREETDLNKRIKSALEEAVWPGRMEIVSKEPFLLVDGAHNSNGVDALKESLMQMYPGEKFCFFMGVMADKDYDVMIREILPLAEEFYTVTPDSDRALQASHLADFIRKEGVKATELSGVDEIRRHLKRDTKNVAFGSLYFIGELKQHRIMEKKDIDWSNLSFGYQETDYSYVSNYKDGKWDDGQLTKDHTVTLNECAGVFQYAQTCFEGLKAYTTEDGRIVCFRPDLNAQRLKDSCERLEMPVFPEDRFVKAVEEVVKANAAWVPPYGSGATLYIRPYIMGTNAVIGVKPADEYQFRILVTPVGPYFKGGAKPITIRVSDFDRAAPHGTGHIKAGLNYAMSLHAIVDAHAQGFAENMYLDPATRTKVEETGGANFIFITKDGTFVTPKSDSILPSITRRSLMVVAEKYLGLKVEHREVLFDEVKDFAECGLCGTAAVISPVGKIVDHGKEICFPSGMDEMGPVTKKLRDTLTGIQMGHIDGPDGWVHEIKCDMDEYEKIRQRKREEYRKRHRAQVRRKQLIGNGIVIGVIILIIATIIIVVALRGKKAKQEEVKAEVTSTLYNPIQPKLDVQLLTPNPYSRPQKALEKVNGIVVHYTANPGTSARQNRDYFNGLAETKKTKASSHFVIGLEGEIVQCIPCNEISYASNNRNSDTISIECCIEDETGKFNDSTYQSLIELTTWLMGRYDLSADDVIRHYDVTGKKCPLYFVEHEDAWEQFHKDLDTYIEENGVPKEETNQTMKEIIGNLLKKENVRQNLSSLRQEIKDENALAEALKLLAGEDELLVSFMGADDAKTRKNAALLIGDLHMSQLSDEVFKAYEAEQMRFVKGSYLAALSQLDCKELLPQLMERAKELEHMTVTDENRKHIEEELNEINKILIKYNGIKHHTPVLEGVKAELLLMTNRLHREVVRRQIPVKDTKLHPLGVLVKTDNIPLIMQVRTFRKMYFTIHAASLLPKDAQEAAALLAESDMYDILRRMHREGGPFYYRIESTADAAYQSRLAKAIDMHFAGRMINSPNDYDVVIKLIPTKNDNFFVCMRLCSIQDNRFAYRKNVLPTSMHPSQAALIVSLAKPYLKETAQIMDPFCGVGTLLIERAHLVPAREIYATDTYGDAITMGRENAALAKTRINFIHRDFFDFRHDYKFDELITDMPVRNRQTKAEMELFYERFFDKAAEHLVSGGIIVMYSNEIGFVKKQIRLRVEYRLLQETCILDKKDFYLFVIRYEDMSQKKYSLLYPDTNAQYRTLSDVTMHDLGMDQICKKLSAKEREQNYIQNVMARMYADPAVTQYRCDIFEDVLQQKKMRDDLMEILERISFLREYGSFNREYDESACIWDLLHRLDELNDYIKCVDAIHTCLAASDIHSAGFLGLKAYVEKIYADNGFAELKKDISELKMDTSQLKSITVGINLNDRFEADGIGLISVNSKYFTKSGILGNFYDHIASKDRINEDTIWKKNFKFQPFDVNADAVISTHMQKVMDTAVMRSESRGGIVKLPEGDQAKDVTRYTDRIVNHMISHMVKRVREVLNKYVSITITDMTDLIPELLYYIKWAEYIQKLQEQGFTFAKASVYKEGENESDPYMMQARGIYNLKLAVFETEESGNIVPNDMDFDRNRRVYILTGANRGGKTTITQAVGQLFVLAQGGIYIPGKAFTFSPVTGIYTHFPADEDKTLDLGRLGEECKRFKAIYEEADSRSLLLMNESFSTTSFEEGYYIAKDSVRAILHKGMRTIYNTHMHKLAFDVEEMNEEQQKAEHADGKAFSMIVHMKGTERSYQIEVAAPEGKSYASEIAQKYGVTYEMLVKMGYVAKIVYDKDNRVTEENDAHGKIKEMRNRMRKIVAATEENKEEILKLYKIQLGREFCPWDDSYPGMKEIEFDLGRESLFVMIDGQEINADAGSKEDRIIAAISIDDDPQVERLDCWSHKLAPGAELSRLAVHPDFQNQKIARQMLVFGMEELARRGYKSVHFLVNKLNVKALRSYAVFGFDTVGECSLFGQPFLCYEKSLMIRFNNDYNRGAFDCILKALADTNTTSYPGYGEDEWCDKVEQIIKGLIGRADSMIKFIPGATQANYVVVAAALSPVQSVIAADTGHINCHEAASIENTGHKILALPNTDGKISAAQIEACAAEYYDNAKPEYLTEPKMVYISFPTEQGTLYTKRELCDISAVCKKYGMYLFVDGARMGYGLGSDKNDLTLCDFAMLSDVFYIGGTKCGALFGEALVINAEDIKYRFKAYMKQNGAVLAKGWLMGLQFATMLENGDYFEKTKRADELAMQIKAAFEQKKVPFWVESFTNQQFVILSDEQKKTLAEKYYFEEMEREKDGTVVRFCTSWATKQEEVDALVLDISKLVMKRLNLSYINVICVFVLSFAVMEYVNLLIGRVGGFPVLAGVLVSYSVMRYGSFARKNMACYMGIYILTWFIGTVVLFIAKYSGWGNIKKLGPAQYFKALYGSTLSEIWGYFFAIVLMLTVIVSIFPLTVIKSRKIYARYVLGNTLFWTIILIPLRFIDKKFVNHKVMWQAGCMMAFAVLLLVLELFVVYRLVKYRYCDEHADRKVRIHRRRVRRKTIKAVIVIVPVVVIAIIVVYTYFMSPSNEPAEYEKVASCITNDDRLGPMVYDSQVYIPITIELDYAGTGSPLGYIVYKDQDYSSRYYEVAASNLLYMNKNGDDTYLQMAGNASNSYKKLSVVEKSNSWKDCSVFLMWDEEWQSESRYSKDVTGYTECDEDFIKSLEDTFGAVKINPADFKDYDAYFTIEGYKSMKDAIESDSHVGTWVGCILAKDDKFYYGSYDNEITGGQLQMLRHVLGGNMTIREQIEKREQEILSPFACLSTNSRGRDYDEPQCDIRPVFQRDRDRILHSKAFRRLKNKTQVFLTPKGDHYRTRMSHTLEVSQNARTIAKALRLNEDLVEAIALGHDLGHTPFGHAGERILNEIYEGGFKHNEQSVRIVEKLEKDGAGLNLTWEVRDGMLNHQTSLMPHTLEGKIVRLSDKIAYINSDFDDAIRAQLLCEDDIPLEIRNTLGNSTKARLNHMVHNIITNSMGKDDICMSKESAQAMQDLRKFMFANLYNNPVAKSEEKKAKAMLKQLYFYYMEHIEELPQKYLAMLGQGDDKGRIICDYISGMTDQYATTKFHEYFVPVAWEIDGYMPYYSDELVEEVRSRNDIVDVIGSYVHLQKKGSTYFGLCPFHNEKTGSFSVSPNKQMYYCFGCGAGGNVFTFLMQYENFTFPEAMQELADRVGIELPKQEMTSAQRREADRRTQLLEINKEAAKYFYMLLRGPRGQRAHEYFKKRELSDETMQKFGLGYSDQYSDDLYKYLRSKGYDDEILKETGLVTIDEVRGGHDKFWNRAMFPIMDVHNRVIGFGGRVMGDGEPKYLNSPETKIFDKSRNLYGLNIARSTRKNQLLLCEGYMDVIALHQAGFDNAVASLGTALTSGHASLLKRYTNEVYLTYDSDGAGVKAALRAIPILKEVGITTKVINMRPYKDPDEFIKALGAQEYEERIKKAENSFMFQIRIMQAGYDMDDPESKTAFYNEIAKKLLGFTEELERTNYTQAVSREYSIPYDDLRKLVNSMAMKGGIVKPQTKLKSGINEKNKKEDGMKQSQKLLLTWLIEDNSLFDRIKGRISADDFTEELYHKVAEEVFSQYETTHTVNPARIVSMFTDEDEQREVAGLFNATIHQVEGKNDKATALRETVIRIKQNSIDYRSKHLAPTDMEGMMRIIEDKRALEELQKIPEMAKKKEQKDMAQEQELRLKFQQKLIEILELGKKKKNMLEYQEIADFFKDLNLDPEKFEMVIDYLEQNGIDVLKISNDDDVDDDIILDEEDEVEVEKIDLSVPEGVSVEDPVRMYLKEIGKVPLLSADEEIELAQNMEDGAVAIEKINVLKGRLDGASEEEKAEIKEEIKTLQRDVDKGADAKKRLAEANLRLVVSIAKRYVGRGMLFLDLIQEGNLGLIKAVEKFDYKKGYKFSTYATWWIRQAITRAIADQARTIRIPVHMVETINKLIRVSRQLLQELGREPSPEEIAKEMSMPVDRVREILKISQEPVSLETPIGEEEDSHLGDFIKDDNVPVPADAAAFTLLKEQLEEVLGTLTEREQKVLTLRFGLEDGRARTLEEVGKEFNVTRERIRQIEAKALRKLRHPSRSRKLKDYLEMKAVASMVTAGYTLCDVGTDHGYVPIALVQGNIIPKAIAVDINKGPLERANEHIRANGLTEQITTRLSNGLEAIHDGEVDSIVIAGMGGELVIHILTAGETVCRSAKELILQPQSEVSKVREYVRNTGYKIVDEDMILEDGKYYPMFRCVPCADNSAWDNMDETTVTVCDLYGPVLIKNGNPVLRKFLVREHHKLAAIMQQLRTQEMSDSIMDRIEQINEMMAYNEAAYSTMGAIRNAGIMQEYSVKVTLPDGQVMAVTASESDTLEAVADRFKDYYEDDIILGIVNGRLRELNKKIKSDCELSFVTTADRDGRRTYRRSVVLLLQRAIYDVYGSMTQLHVMHSLGEGYYCQLEKSVTEHDIDRIVCSMYSFVEKDLPITKHSAKTQYAEQLFKEKGQHDKERLLHYRRSSRVNLYELDGVVDYFYGFMAPSTGMLKYFDIVPYESGFVLLFPGANSRSVEPLVTSNKLFHTLDDSREWSKMLGIGTIGSLNDAIAAGRGQEIMLLQEALMEQKIGNLAAQIASDDKKKFVMIAGPSSSGKTSFANRLSIQLIAKGRKPHPLSLDDYYVDREFCPKNPDGSFDFECLESIDIKLFNEDMNRLLKGEAVDMPSFNFKTGKREYRGRKLVLGPDDILVIEGIHGLNDRLSQLIPSEHKFKIYISALTQLNIDEHNPLSTTDERLIRRIVRDARTRGTNAMETIAMWPSVRKGERENIFPFQEQADVMFNSALVYELAVLKVYAEPLLFGIERDCPEYLEAKRLLKLLDYFLPMPADGIPNNSLLREFVGGSCFNVMREKFIRFMNGRNGMDELARAESWVVMILLVVSIFTRSAILDILAIGLMIHMYFRVFSRNVSKRYAENQKFLNARYEWTVKAERRKKRFAQRKQYKFFKCPMCKQEVRVPRGHGKICITCPKCREQFVRRSMFGYITVNKDTLSEENKKIYQSYYCGLCQTMKSQYGRRAQMALNYDMTFLIVLLTGLYEPDSVTREGFVCSVHPTKKRTLRTNEITEYAAAMNILLAYYNLIDDWKDDKSLTKKTYAEMLKKDFEKAKKGYPVQAKAIEDYIARLTECEKSNDTNIDAVAGLTGEMLGILFAWKQDEWQKDLKEFGCYMGKFIYIMDAYEDIGDDVKKKSYNPLIQLMHCCNNDQEKFDKSCRLMMTSMLSEAAKIFERLPILLHADIIRNVLYSGVWSKYEYIQMKKRKKHKMIDPYQVLGVSRSASDDEIKKAYRSLSRKYHPDANINNPNKDQAEEKFKQVQQAYDQIMKEKQSGAAGAGGYGAGSSSSYGGSSYGGAYGSGPGAGDPFGAGGPFGGFYGRYTYNNAGSSAQDDNPKVRAAGNFISNGYYNEALKVLEEVPFAERRGRWYYYSAVANQKLGNTATAIEHIQRAVSLEPNNMQYRQFMQIIENGGSWYSDMGDIYGRPSGRGSECCSLLATFLCWQMFCCMSVNESQIKNTTAGAIDDDDAVIFKERKRLLFLGLPWTFTKYTVTPSFITVESGLLSTTEDDCYMYKVADVKLTTSLMERIFKLGTIVCYTGDVTNPELKLVHVKHSREIKNYLLKQSEAARLKRRTLNTVDIGAHGADMADLDHDGIPDSMEMRHLMSPLDFSVEELDKLLDLANDIEAHPEKYAHKCDGKKLATCFYEPSTRTRLSFEAAMLNLGGSVLGFHSADSSSASKGESVSDTIRVISCYADICAMRHPKEGAPLVASEKSRIPVINAGDGGHQHPTQTLADLLTIRSIKGRLNNITIGFCGDLKFGRTVHSLINALIRYDNVRIVLISPEELKVPDYVRDDVLRANNIEFKEVEKLEDAMGELDVLYMTRVQKERFFNEEDYVRLKDFYILTKEKMELAKDDMIVLHPLPRVNEISVDVDDDPRACYFRQAQYAVYVRMALILTLLGLAEDMLNISGIHEGFVLDHIKAGMSLQIYRDLKLDKLDCTVAIIKNAKSSKMGKKDIIKVECPIESLDLDILGFIDHNITVNVIKGDKIVDKMELKLPHQVKNVIKCKNPRCITSIEQELDQIFVLSDEKNEIYRCKYCEEKYEGVKMYANVIVDISHEKLDKTFQYSIPDEILCDIRPGVCVDIPFGSRTITGYVIEVTDKPEYDPARTKPLIGIKADSVAVEAKLIALAAWIRRNYGSTMNQALKTVIPVKKQAKEQVSRSIALKIDKVKARAQLALCEAKKQKAKARLFRALIDADDGARLEYSFVTGKLSVSAATIRALEQSGFIEVITQSGYRNPVEHMSVDTYDKVLNAAQQSVVDAIEGDIAAGLRNTYLIKGVTGSGKTEVYMELIAHCIQSGRQAIVLIPEIALTYQTVMRFFARFGNRVSIINSRLSNGERYDQFERAKNGDIDIMIGPRSALFTPFSNLGLIIIDEEHENSYKSESVPRYHAREVAIEYARMSDAIVVLGSATPSVDSYYKAKTGVYRLLELDKRVDDRPLPKCEVVDLRQELREGNRSILSTRLQELMEERLLNGQQTMLFLNRRGKSAFMSCRACGFVVKCPHCDVSLSEHSGGVMVCHYCGYRQPVPKVCPSCGSKYISGFKAGTQKIEAMVAKRFPQARILRMDYDTTRAKDAYEKILQAFSNHEADILIGTQMIVKGHDFSNVTLVGVLAADMSLHVNDFHAAERTFALLTQAAGRAGRGKLPGNVVIQTYDPDHYAIRTAKEQDYEAFYDKEIEYRRLMHYPPVWNMLLVHVTSPDESECGSMAQQVYDIASQMISHTDENQSQDDRHLIQLIGPADATIAKVNDIYRKVIYMKTSDYAALISIKDGIEQAVKADTAMKNANISFDFNPMSGFMALRTIRVEGDPVLGKVCREVTEVTPKIVTLIDDMLETMYEANGVGLAAPQVGILKRIVVIDVGEGPIVMINPEIIESDGEQTGDEGCLSIPGKAGQVTRPNHVKARFMGEDMNEYEIEGEELLARCICHELDHLDGHLYVEKVEGALHDVTYEDTQEMLSELGKYLGGSKMRVIFMGTPDFSVGTLEAIIEAGHEVALVVTQPDKPKGRGKTMQYTPVKECALSHGIEVFQPVKIRETANIEYLRKFNADIIIVVAFGQILSKSILDMPRYGCINVHASLLPKYRGAAPIQWAVINGDEFTGVTTMRMDEGVDTGDMIAKSTVRLAPDETGGSLFDKLSAEGAKLCVETMKMIEDGTAEYTPQNSEEATHTSMISKELGFIDWTKPAVEIERLIRGLNPWPSAYTHLNGKTFKVWSAKVIDGSDDYEPGCIYHIGKNDMYVQTGKGALSLVEVQLQGKKRMDTGSFLRGCHVEEGSFFTLMGYYYWDPTYILVVIGAVICMIASARVKGTFNKYSQLRSMSGMNGAQVAQRVLQAAGIYDVQVRHVSGSLTDHYDPRTKTVNLSDPVYNATSVAALGVAAHECGHAIQHAKSYAPLSIRSALVPIANFGSMLAWPVILIGLLFNTRSSGLIIDIGILLFSAAVLFQLVTLPVEFDASRRALVMLRTQGILADDELKYTRRVLKSAALTYVASAAAAILQLLRIILITNGRRRDDMTSNKNINNHNNKNSQINKNNIPGRPARSNVAAHNEHSVDTRELALEMLIEINERGAFSHIVLRSVLDKYQYLSKQDRAFMTRLVDGTIEYMLQLDYIIDSFSKTKVRKMKPFIRNLLRMSVYQIKYMDAVPDSAVCNEAVKLAKRHKFAQLSGFVNGVLRNIARNIDSVQFDTLSIRYSMPQWIVDRFVSAYGEKKAEEIFKAFHSKSTISIRTNLTRCTPDELRAMLEAEGVTVTAVDELDYAFVISGFDYLNGLQSFRDGLFYVQDISSMLVAQTAAPKKGDYVIDVCAAPGGKSTHIAELLQGSGHVLARDLTDTKVGMIEENIERHGLKNMSAEVWDATVPDADSAGKADILICDLPCSGLGVLGRKKDIRYKMTPESVDELAALQRQILDTVHTYVKPNGVLMYSTCTIDEAENEDNVRWFIEKHPEFELDKSFAEGTGMKQILPGEHGSDGFFIARFIKSKLMEQIKEQLTDIKSMNMDELTEFIISLGEKKFRAKQIYEWIHVKHVESFDEMTNISKKFIQVLKDNAILISLKKEEVQVSKLDGTRKYLFALDDGNVIESVLMKYKHGNSVCISSQVGCRMGCRFCASTLDGLVRGLRPSEMIDQIYQIGKDIGERISNVVVMGTGEPLDNYDNLLRFIELLTDENGINISQRNLTVSTCGLVPRMKQLADEKLSITLALSLHASNQEKRKALMPVANSYDIHDVVDACKYYFAQTGRRVTFEYSLVGGVNDTAEDAAELSALVHGMNCHINLIPVNPIKERDYVQSNKGVIEAFKNRLEKNGINVTIRREMGRDIDGACGQLRKKHIDKERGINMKTFSITDAGAIREMNQDFYFSSDTAVGNLPNLFIVADGMGGHKAGDYASRYTIERVVASVSRNAGDEPVSIIKEAINKANELLVAESREDEAKRGMGTTLVIGTIIGNKLFVANIGDSRLYIVGGTEQIRQITRDHSLVDEMVRMGEINADEARVHPDKNIITRAVGAADHVEADFFEVELCEDDRILLCTDGLTNMVRDEEICDTIRQNDNIETAASQLVAMANANGGRDNITVMIIKPFMLEIGSFLSDRYEILSKVGAGGMSDVYKAKDHILSRFVAIKVLKQEFSEDSSFVTKFRAEAQSAAGLEHPNIVNIYDVGSENGLYYIVMEYVEGITLKTYIEKKGQLSFKESASIAIQVARGIEAAHNKNIIHRDIKPQNIIISTDGKVKVTDFGIAKATSSNTISSDVMGSVHYASPEQARNGFVDGRSDIYSLGIVMFEMVTGRVPFDGDTTVAVALQHLQEEIARPSIYAPDLPISFEKIILKCTQKTPDRRYQTIEELLTDIRRSLAHPDEDFVTIAPLVDGGKTKVISPDELDKIKEGRGVAEDLNDDDTDADNDDEYADGEDDDDEYDESLLDDDDDEDDDDDGKLLNPKMDKAITIMGIVTAVIIVIVIIYLALSVAGVFKFGGKKNSESQQTESQTQTESESESETQTETEGQMIDIRGMSVDDAQKAVDRLKLDLTVFAFETKQSDEKDGTILEQDVKGGDTVKRGSQINVVIAGKGDSTSEMVKVPSVIGKTKSSAKSTLESAGFSVTFEYGDYNNSVAADVVTAQSPSAKKQAAKGSTVTVTLSPGQKPITVPNVVGASQSQAESALAGAGLKYTYADSQYSDTVPAGSVISQTKSGETVAAGTTITLTLSKGKQEISTNVSKGISYSGEGTVVKAEYKLVGKSGTVYDKGSYENTSSFTVSGTMKEATGSIVVTWTVQTGETDEAGNPATVTLDPVTYSVPMPAPATHTTSKRGMHPAESVTPANTKAHKENHDRKNYMTGKIIKGIAGFYYVYVEEIKEAKETATGGTLYECKAKGTFRKQKIKPLVGDIVDIAVLDDEKHIGNVERILPRKNELIRPAVSNIDMALVIFASAKPDPNFNLLDRFLCMMEYQHVPVTICFNKKDLITPKEQQELKSIYEPAGYRVLFTSTKTGEGIDEIKHILEGRTTTVAGPSGVGKSSIINCLQDDVQMETGHISEKIERGKHTTRHSEIIPIKDGTYIMDTPGFSSMDVPGFEKEDLWTCYPEFVEYEPYCRFQGCSHINEPDCGVKEALADGKISQVRYDNYKLLYEELKNRQKYMNCLSPSILSADYSILGEQLKQLDEAGAQYVHIDVMDGSFVPSISIGLPVIKTIRRCTERMFDVHLMIDEPVRYIDDFATAGADIITVHAEACKHLDRTIEAIKEKGILAGVALNPATPLSAIEYVLPKVDMVLIMTVNPGFGGQKLIPYTVDKVRDLKALLEKTANKADIEVDGGVNLENVETLLAAGANIIVAGSAVFNGGIEENVKGFLNIMMMKYLIVCGGKTDKEFGLNEIKTDGIDAIIAADSGMDFLYENGVTPDIIVGDFDSATTKALEFFERKGQTEIHRLNPIKDDTDTEYAIRLAIREGARSIVMLGATGSRIDHVLGNISLLGIGLESGTDISIIDTNNRIRMADKPVTIEKSAQYGRFVSLIAVTDDNEVSLRGFKYSVTDYSFDRFTSLGISNEIIDDHAVIDIHRGKFIIIESKDMSQKIDFLGIWDYYIFRIISENMYGHTVKTGEKGHYAFFMHSFKSDEFKIRVLTKDDAEEYNALLRYAFQVTEADLAETGWKDDEIKQSKFPVLERADVLGCFNIIDKKEELVAQFAVYPLDMNIYGERYEVGFVTSVCTYPEHTGHGIMKKLMRKSLTRMRDSNKSFALLYPYSIPLYRGLGWEIISNKMTYVIKDRQIPTKLKEPGYVRRVQWDDEQFKKLHTHFAAKTHGCLYRNNLAWEEYFRWDEDDTMVAIYYNEDDEPCGYMVYLISSDVMHIKELIYLNREAQLGLWEYIHAHDSMIDEVRGNNYYSEPIAFELDDSDIKETIRPYAMGRIIDVAQFILQYNCDPDGPGGCFSFEIEDELLPWNNGTFVIDFEGGHCTLTDKKPQHHLSMSIGTFTTLLLGYKSAEKLLQMGKIQATYDAVAKLDDILYHEIPYVSDYIMSNYVISCCSTADLTREHMLERNIKYACFHYELDGKEYMDDLGQSMPLPDFYKAMEAGAMTKTSQINQEEYMEYFRQFLDEGYDVLHCTLSSGISGTVNSARLAKEALKEEYPDRKIYVIDSLAASSGFGLLMDKLADLRDSGMDIDTLADWTMEHRLEVNHWFFSSDLTFFIRGGRISKTAGFVGNVLNICPFMNVSNEGKLIVREKIRTKKKAIKEMLVKMQALCKDGADYSDKVYISNSACYEDAKAVADLIEAAFPKMKGKVEINDIGTTIGSHTGPGTVALFFWGNKREDMKGYEKYERSYFLPPECTYDWVKKDYIDKAPLWCSVDLRDGNQALIEPMSLEEKLDFFKMLVDIGFKEIEVGFPAASETEFNFTRALIERDMIPDDVTIHVLTQAREHIIKKTFKALEGAPRAVVHLYNSTSVAQREQVFKKSKEEIKQLAVDGAILLRDLAAETDGNFRFQYSPESFSGTEVDYAVDVCNAVLDVWQPKADNKAIINIPTTVENAMPHVFATQIEYINKHLKYRDGVVLCLHPHNDRGCGVATSELGVLAGAEEIEGTLFGNGERTGNVDIVTLAMNLYSHGVDPQLDFSNLPEIREKYETFTRMKVGERQPYAGDLVFSAFSGSHQDAISKGMAWREEKKLDKWTVPYLPIDPKDVGRTYEADVIRINSQSGKGGVAYILKQSFGINVPQQMREQVGYMVKQVSDEEHKELSPEWVHSIFTDNYVDFHPYFTIPECHFKQVNGIFAEAVILHNDSTRKVDANGNGRLDAVSNIIKQYFDISFELTVYEEHSLSHGSSSKAMAYVGITVDGSMFWGAGVDEDIIKASIGALVVAVNHYLATKADSHVKDERYIAMLNFIQANYKTVSLADMAAQFNLTEPYISKYIKEKSGKTFGELVTNAKMKKARTLLRNSITTVENIAIEAGYQNVEHFNRQFKKLYGMTPLEYRNSSTKMSNKTSAVVKTNPRKAVMIGCGFVGSASVFALMQSGLFSEIVLIDADKDKAEGEAMDISHGIPFARPMKIYAGGYDDVADAAIIVVSAGAGQKPGETRLDLVNKNVAIFKSIIPEIAKRNFGGILLIVANPVDILTQVAQKLSGLPEERVIGSGTVLDSARLKYALGEHLEVDSRSVHAFIVGEHGDSEVVAWSSANVSGVELHKMCEMRGHYKHKENTEEIAANVKNSAYEIINRKHATYYGIAMSVRRICEVIMRDEKSILPVSHMMHGQYGIDGVVLSMPAIVGANGVESDIPIELNGEEALKLKESADALKSILDGLELMSERKQIHQEFLTGERALFASNDLDIYDTIFDDGESPLKESHGISLTGCFFRWKYPLWYCSDIEVKDCTWFDMARAGVWYTDNISVTDSIVEAPKNFRRCNNLKLKNVTFPNAQETLWSCDHVNIENVSAKGDYFGMNTNNLIMKNFQLVGNYSFDGSRNVEVHDSKLISKDAFWNTENVTVYDSFITGEYLGWNAKNLTLINCTIESLQGLCYIDNLVMKNCKLINTTLAFEYSSVDAEICSKVDSVLNPTSGVIRAKEIGTLTIEKDRVDPSKTKIICEGKMYDFDTVVDRRNTGSLKWDVAENELPMWVADMDFKTAPQIIDAISERVSHGVFGYSIIPDEWNDAYISWWDRRHGLKIERDSLIFCTGVVPAISSTVRKLTTPGENVLIMTPVYNIFFNSIFNNGVNVQESPLGYENGRYFVDYDRLEHDLSNPQTSLMIFCNPHNPCGIIWTKDELAKIGALCRKYNVTVISDEIHCDITAPGKSYVPFAAASEDCADISITCIAPTKCFNMAGLQTAAVMVPNKFLRHKVWRALNTDEVAEPNAFAITAAVAAFTKGEPWLEELRKYLWENRKKVCSFVAENLPQIHVVDADATYLMWLDCSALTDDSVAFTQMIREKTGLYLSEGAEFGGNGRYFVRLNIACPRAVLMEGLERLKRALVMRNNESSENYLETILILSKKLPVVRSVDIANELGYKKSSVSIAMKNLREKNNITVSDAGFITLTESGRQIAEMIYERHELLSECLEKLGVDKEIAAEDACRIEHVISPESFEAIKKHIHKSMHSFLYSFKYFNICFIFSPFRFYVADYSFTIIDDFSHIYKKNDTLKNQYPAVLVSYISSYVYASMKQILKYLKEYKKECICAPLFKLLEASFELIVPLVMAAIIDNGITASDKPYIWKMGGVLVLLAAVGLVSSVTAQYFAAKAAVGFSTKLRHILFEKIESLSFSKMDTVGTSTLITRMTSDINQVQSGVNLVLRLFLRSPFIVFGAMAMAFTVNVRAAMVFVVTIPLLSIVVFSVMVASLPLYKKVQSSLDTVLSHTRENLEGTRVIRAFNKQNDEIDSFNRDNEFLTNMQQVVGRISALTNPLTFIIINIATIAVIVSGGKQVYAGILTQGEVVALVNYMSQILVELIKLANLIVQVTKAVACGNRIADVLSIPSKLPEKNPKLIGAKDGAPEVEFDHVCMTYEGAADETLTDISFTVQKGQTIGIIGGTGSGKSSLVNLIPRFYDATKGTIRIQGNDINDYDAVQLRDKIGVVMQKAVLFTGTIADNLRWGKNDATEEEMWKALDIAQATEVVKGKEGGLDYMIEQGGKNLSGGQKQRLTIARAVVKDPDILILDDSASALDFATDASLRAALKGMHGDKTIFIVSQRTSSIQFADNIIVLDDGQMVGFGPHEKLLETCETYKEIYDSQFKKESDMTRQKEVMAMDNAKMNKAGTMRKVLRYMKRYIPLLVISLALSIVTVALTLYFPILTGRAIDLIVGKGKVDFTAMTAILTRAAIIVVIAAAAQWLTNICNNRMTYNIVRDIRRDAFLNIEKMPLSYIDSHSHGDMVSRIIADVDTFSEGLLMGFTQLFTGIATIAGTLIFMLTIDVKISCIVVLITPLSLFVASFITKKTYSMFQLQTRTRGEQTSLIDEIVGNEKVVQAFNHEDEALEQFDEINDRLQKCSLRATFFSSLTNPCTRFVNSLVYAGVGIFGAMSALTGGITVGQLSCFLSYANQYTKPFNEISGVITELQNALACAARIFELIEEKKEIPDASDAVILEEADGRVDIEDVYFSYVPDKKLIEDFNLHVKPGQRVAIVGPTGCGKTTIINLLMRFYDVNSGTIKVSGHDIRKITRESLRDNYGMVLQETWLKKGTIRDNIIMGKPDATDEEIIAAAKASHAHSFIRRLPKGYDTEIGEDGGCLSQGQKQLLCITRVMLCLPPMLILDEATSSIDTRTEIKIQKAFLTMMQGRTSFIVAHRLSTIREADIILVMKDGKIIEQGNHESLLAADGFYANLYNSQFAMKKKVLITCAVVLGVILAVYLGFAFYFSSHYLFNTKINSVKYVGKTAKEAIEKNTALSRDYLLTITDRKGNSFSLKGPDFSYEYVSNGDEEQIIKSQNAFTWPVSLFKAQNYTLKGSSKYDDAALAEKLKALDIFSDDYIENPEDAHIEIKDGKYDVIEEKNGCKPIYDSILAEVKDALDNELPKLSLSDECYEAPKITKESDTIKNEKEALDKYTASTVTYKIEGADEKLDSAKILDMLSISDDGSVSIDDAKVTKYVQQLASKYNTFGRKRSFKTSSGDTIEIGGGDYGWVVSKKNEKAKLLSDLEGGKPVEREPVYEQTALYRGADDIGNTYIEIDYTKQHMWYYKDGALQMESDFVSGNLARQNGSVDGVYKIVYKQRNATLVGEGYSSPVSYFMPFAYNIGIHDASWRDTFGGTIYKTSGSHGCINVPPAFAEQLFNAVDKGTPVVAYYREAVTLTNNAAKMSNAYSYVAPDAAQMNQSNCIVAQSGGPTVAINASLAGVIAGVKSSEKYDICYGAVNGILGILNENYLNLSDIFADDANLEKLKTTPAMYLGSCRHKLPDYKDDDSPYVYIFHQFDKLSVKAFFYIGGNDSMDTVLKLSDYAKKINSDVKIIGIPKTIDNDLCMTDHTPGFGSAAKYIASSMLEIAHDTFIYAVKSVTIVEIMGRDAGWLTAASALARNEYNTAPQFIYLPEVDFDKDKFVADIKEALAHTNNVIVAVSEGIHDADGSYITSSNASCDQFGHQQLSGAGKALEFIVKENIGVKVRSVEVNVLQRCASHLASLTDIEESFAQGKKGVTIAAEGVTASMVCLKRISNDPYQVEYTYSAIKDIANEAKSVPREWINDAGNDVKPELIEYLKPLIQGETAVAYKNGLPDYMDVSHLHKCNMKNMNKYENCLLCPRKCGINRRTGQTGVCGVSSEIKVARAALHYWEEPCISGKRGSGAVFFSGCSLHCVFCQNREISDGKEGKVISKERLSDIFMELAGKGANNINLVTPGQYIPDIVWAVNDAKSRGMKLPIIYNTSGYENVTELKLLEGIVDVYLPDFKYMDSTLSAMYSRAKDYPSVAKQALSEMVRQQPDVVIDDATGLIQKGVIVRQLLLPGHVNDAKAVLKYLYDTYHDHVYISMMSQFTPIALKDYPEINRTVTKREYERLVNYALEIGITNAFIQEGDVAKDSFIPAFDCEGVMKNIGEQQIIIECPNTIFHLYIDSEDELSKVKVFMNNIKHVDSISLHDIYNWCNRQHVQYTTTFNYDSKMTWTEMIKSYIFYFRQKLRYVNNSDRMIETMRYPEFLKDRGTIGFVAPSMGCTTEPYRSAFDNAIKRFHSMGYKTIEGPNCRCDSGIGISNTPKKCAEELNESYASVDSDVLISCGGGELMCEVVPYIDFERVKQSKPKWYMGYSDNTNFTFLEATIADTAGIYGPCAGSFGMEVWHESLTDAFDLLCGRKLSFTNYPMWEKESIKDENAPFVGYNLTEKSCISSIPAVAKESRLTMRGRLLGGCMDCLINLLGTSFDHVREFNERYSDDGIIWFLEACDLNVMGMRRAMWQMKNAGWFSNVKGFLIGRPAHFGEEMFGIDHRQALSSLLREFNVPIIMDLDIGHMSPMMPVVCGSMADVSFDGSNFTISYDIEQMIRSIKKKAKSIVCSVLAAVTLFTMNPVVFATETATQTDTVSSVDVSGSDAADKSNTDSTADSTTTAGSETNDKVTISKNDKPYLSLGADLTPDQRATVLGFMGIELTDLDKYDVVYVNNDEEHKYLDSYISKSEIGTRSLSSVLITEDKKGAGLSVSTHNINYCTVGMYKNALATAGIADAKIIVAGPFPISGTAALVGTLKAYEEMTGKKLDDKVTDAAMDELVTTGELNKSIDGDSQDIEAMIADLKKQLADGRLKDESQIKDAIKEAAKDYDLKLSDDDIAKLTSLLMKLKDANIDWDSVINQAHDWASKLGDKINDPGFWEKIGNFFMDLWDKIKSLFSMIKINKFLAASVVTLSLAACDLAPYSSIAVYADQAAKVVCDERYWVAARSGPGTEYELEHKLSNGKDITILEQTTGADGKVWYKAKYNLAANNEECVSYIRSDFVSAGTAASDNAQTGDASADTGNADAIQQNNEEQLAIATASGAYATGTITGGNVYVRNAAGTSGTTKVVSLNWNHQVDIIGETRVNGVVWYNVKGTLNGKAFTGWTISTYIKVTYNNSGDNTDFVTAMKNAGFPDSYIPNLTALHNKYPSWTFEAVNTGLNWDTVIENESVHGINLVSKNADNAKKSTENGAYNWETNKWFEYEPGWVAASKDYIAYIMDPRNFLDETNIYQFQSLVYSSSENLSGVQSIVKGTFMEGTKNYSNNGEKIDYARTFLDVAKATGVSAYHLSARVKQEQGKGTSPLISGVYSGYEGYYNFFNFSATGSTKEKIYQNGLAYAKKNGWSSRTKSISGGAEKIAKDYVNRGQNTIYFEKFNVVDSKSLYSHQYMANVTAAITEGQNLSKGYSDKNQAFVFKIPVYNNMPSSAVGFNKAGDTNNYLQALSISGVSLTPVFNGVTTSYSAVVSNAISSVTVSANAVSGNSYVSGTGNYSLAVGNNTIKINCKSQSGETRTYTITINRQTSANNTNNTASGTDVNISSDTYKIGTYITGVAPETMASSFIKNISVSASGSIKLLTESGKENTGTVATGNKVAVYDLSGNLKKTYDIVIYGDVSGDGVVNVKDSMIIRRHIIGRSTLSGAYMEAADTSKDGTINVKDSMIIRNHILGRKNIEQMKKITSYILSVLIMTIVVFSNKNIVLAAGSISVSASKTTVKVGDVVTISTSISPGEYGVNATLTKSSGAFEFVEGDNIYSDGGTPNNSIKVKAVSEGSCTFSVRVINAFDDQLKETSMSSGSVTITATSASSNNDSNSNKDNKDNSGSNTGNDSNANKDNENKEEKKSSNASLGSLVISAGTLSPEFSAATKDYTATVDYSCSSLAVTANPADSKASVTSVTGNDSLEVGENTVSVVVTAEDGSTSTYNIVVTRRAEDDPENADKQDNWKKFDINGTEWTMVNDIPEDVVPEGFEHSKTVIDGLEYNTLHGTFGDITLVYLQSESGNGLFVYDAAQNTAYEFVRINSESHFIVVLLPKVDDVPEGYNEISLSIEGKGVATAYQTKGEKTDDQTKDFYLVYAMNDNGESGWYTYDSVDGTYMRTELSTPTVAQEENDTTKSELVPGIANKYLVLAAILVLIIIILALLLLVVIVKNKKRTANEENDEEDDTKEFDIEENDIEANDDDDAQEPAEESQIDEIQESAEESQVDEIREPAEESGEESQIAEILESDENMGSTEASDASYVGRTVEITSDLKKTAENEKTDFDSKEASDQENAADDDTLKNQVQMALDGFVNEENKPSETIDSSAKDDNEDDSEDDDLQFIDLNMKPYTSKAKKAIDLAVRISKKMNYSYVGTEHILAGLIKEGTGVAAEVLTACNVEYDKLISMIEDLISPGDNIEVMERDGYSPRTQRVLERASEEADRFECNEIGTEHLLMAIVLQGDCAAARLLNTMGVNSQKMFIDILGAMGEDPSAYKDLMKSYNTSYNSATPVLDQYSRDLTDMAEAGLLDPVIGRKKEMERVIQILCRRGKNNPCLIGEPGVGKTAIVEGLAQDIVSGNVPDILLGKRLVSLDMSGLVAKSKYRGEFEERIKKVISEVSNAKNVLLFIDELHTIIGAGGAEGSLDASNILKPALARGEVQVIGATTIEEYRKYVEKDAALERRFQPVMVEEPGVDETIEILTGLKGLYEKHHGVIITDEGVKAAVNLSARYINDRFLPDKAIDLMDEAAARIRLKNLTSSDELLALKKEITDKQNQLENALSKGDLAAAGALMSEKEVLENKQQKLIRKNRRTGAKNKPVVGENEIADVVSGWTKIPVNKLTESEAGRLAKLEQILHKRVIGQEEAVSAVAKAVRRGRVGLKDPKKPIGSFLFLGPTGVGKTEVSKALAEAVFGKEDAMIRVDMSEYMEKHSVSKMIGSPPGYVGHEEGGQLSEKVRRNPFSVILFDEIEKAHPDVFNILLQVLDDGRITDSQGRTVDFKNTIIIMTSNAGASSIIEPKRLGFGAGEDEKQDHERMKNSVMEEVRRIFKPEFLNRIDETIVFRALNKDDMKHIVTLLVKELKKRCKEQLDIELTVRDSAKSFIVDKAYDRKYGARPLKRKLQEEIEDRMSEDIITGKIKRGNKVIISTKNKQISLTVEMAVISELIRTEENGKLSFGDYTLAAKAKLDNFEKDGDIYKVKTFKEITKLERNGLFVYESVPGTAVMDFEETADTVTFTVEGPEDAQITLGLEEETEYEIDIAGAVAGTMKTNLGGKLSLSVELEGVDSVDIKVSRKMAKGKTSVFFCQECGYESAKWMGQCPACKEWNTFVEETVDKKSISSSGKVKKESKAAQVLPLSAVKSEKEERIVTGIAEFDRVLGGGIVRGSLVLVGGDPGIGKSTLLLQVCRELSQKKVPLLYVSGEESLHQIKMRADRLGDFTDSLELLCETSLDIAKDVIQRKKPEVVVIDSIQTMYNEEIASAPGSVSQVRETTGVLMQLAKTLGISVFIVGHVTKDGAVAGPRTLEHMVDTVLYFEGDRYESYRILRGVKNRFGSTNEIGVFEMKAEGLVEVENPSEYMLSGKPEGASGSIVTCSIEGSRPILLEIQALVCHSFFNNPRRTANGTDYNKVNLLMAVLEKRANLSLSDCDAYVNIAGGIRMNEPAIDLGIVLAIASSKKDIIVREDTICFGEVGLSGEVRGVTMSEQRVAEAKKLGFKKCIVPKVCLAGVSHISGIEIVGVANIKEAIEAVRMVLLVVDAQNGIVDERLYAFRKFVSNIKKLIGAAREQGIEVIYVQHDDGPGTGFSIGDDEFEVYSEFQPMPDEKRFIKSVCSAFKKESGLLEYLTAKEEKDVMICGIMTDFCINATVEAGFEHGLHMIVPAYANSTQDNEYMTREQAYHYYNEFLWPERYADCVPMDRALELLKKMCSEWDYLRNGGRNREEELLANCYFNSMKLARDNGIRSIAFPSISTGVYSFPVELAAKIAVRTVARFLQENPGQFDLVEWVLFDSHTESVYEAEVTLYYNIRIMTKDEWYRQLFERLDNSKFRSSFHLKQKDIDYINKKGLETIRQHAKDFITKREAPAYIANDGKQTPMRGHPVFIAQHATATCCRECIRKWHKMQPGKELSQVQQDYLVDVIMTWIQREMDRQMERVVQFLKEAETYYLATVEGDQPRVRPFGTAHIFEGKLYIQTGKVKDVSKQIHANPKVEICAYKNGEWLRVAGELVEDDRREARQSMLDAYPSLQNMYSADDGNTEVFYLKNATATFSSFTHEPEVVKFMKFGMRTPSIKKSIKARTTGKAKRAVKKALIPGYGKNVQDGLRIQRKQLTIRFIRRRALALMGNNGIELERDGFKSRTGFILACIGSAVGMGNIWRFPYMVSAWGGMTFLIPYVIFVILIGSTGVIEEMALGRATKGGPIKAFGDCMQMRTGKRKAGESIGFIPVLGSLALAMGYTVVVGWIFKYTYLAFSGKLSAMGNDMSAIGGMFGSTASSFGNNMWLIIAMVVTAVIMALGIAGGIEKANKVMMPLLFIMFVGLGIYIFTLHGSSAGYKYIFTLNPKGILDIKLWIYAFGQAFFSLSIAGNGTVIYGSYLSDKENVVTSARNVAVFDTIAALLAAFVIIPGMAAGGAELSSGGPGLMFIYLVNVFNGMPGGKIVGIVFYVCVLFAGMSSLVNLYEAPVATIQEKLKLNRVASVGIIAVAGCVVSLVIQGIVSGWMDAVSIYICPLGAMLAAIMFFWVAGKKFAVDAVNAGADKPIGKWFVPLGKYVLVPLSLVALIAGALLGGIGMLTRTALERRQSLISPASPRLSLTARAASSERASILNLLQWTYGIVIITRRKDMINIKKVFVNPVTISLVIGLFLFITGIKLPGVINSTMAGVAALNTPAAMIVLGYYLSCVRICDLLLNPSLYLASFVRLIIIPLLTLLVLYIIPVGHGQIGMITLIAAATPVGTSTAIFAQKFGQDYERAVCMVCLSTLFSIITMPVVMYLAQMWIMMTEEICLAVSSSHPLAHTGHISVEQMMDEKFIDLADTPSYAGVFNSIFNKCKKTPQIAYSCNDYILQGKLISLGLGVSFVASVTWTSSSLPENINLLHIDDCPHFRSIYYQPLGSFCSENQRIFEHQLEEYFKKLNKMKIAAFSVRPDEKQYFDTFANVYKVELQINRSGFTADDIESVKGCEAMSVCDGMCDLSAPVLEKLAAEGVKYIGFRTIGYNSVDLEAAKRLGIRVAHSGYSPYSVANYTVMLMLMCIRKALYVMMRSHTADYSLGPICGREMQNMTVGIIGTGRIGKAVIKNLSGFGCKIIAYDPYPAKDLENVEYVTLDELYAKSDIISLHTFLSVETYHMINKDSIAKMKDGVILINAARGALVDTKNLIEAVESGKIGSVGTDCCEGEDDFIRTDRKYDDLVVNHDYIILKSFQNTIVTPHIAFFTDQAVSDMVESSVKSVVQFAAGEDTPLEVHMEYEISNRLSGVHGSMIRELFKLGASKDIISFGGGNPSAETFPCKEIEEIAAKGLSENPVSLLQYGLSEGYTPLRDTMKKYLEKKEGFDFENNELFIVSGGQQCADLTTKALVNEGDVVLTEEPAFVGCLNTFRSYGAKLVGIPMEQDGMNINALEEALKANPDAKLLYTIPSFQNPTGITTSLEKRKKVYELCCKYDIAILEDNPYGELRFAGENVPTIKSMDTEGRVIYAGSFSKVMAPAFRLGFLVFNKSLTGPLTVAKQCTDVHSTVLFQYICNEYINNYDFDKHLEDSRKVYEHKCNLMMECMKKEFHPSVTFGHPEGGLFVMAFLPDGMDSAPFVREAINRGVLSVPGAAFLADENQKSNGFRLNYSTPSEEQIVKGIEILGKLTYEWIKMYYDFLVKIPENTGKISKNKRGKTTYIEYTYGRKYIPDKKYNIPQRTTIGKMSDEDSAMMYPNLNFEKFFPEVSLPECNPSARSSCIKVGAFLVIKKIIEDYGLFDHLNSWDERGKGLLLDLAAYSIISENNAAQHYPEYAYNHPSLTSGHKIYSDSTISRFLSEIGSDERMDFLNSWNDCRNHKERIYVSYDSTNKNCKAGDIEKAEYGHPKEDVGAPIFNYSIAYDLNNQLPLLYESYPGSVIDVSQLQYMIQKIRGFGYKNLGFVLDRGYFSKENLAYMDSCNYGFVIMVKGRASFVKNQILSHKGEFETKRACAITQYRTYGMTVREKLYTDDDTDRYFHLYYKSSRANAERTQLENLLLRMAEIMDKGKGRNIEFGKLYEHYYDLTYHEKNGVRKFYGYKEREAVIEKELELCGYFAIVTSERMSAEDALLLYKNRDSSEKLFCSDKSFLGNRSLRVYGNEALESKIFIEFIALIIRSKIYTMLKKRMAEMAKRPNYMTVPAALRELEKIELIRQPGGHYKVDHAITATQKTILGAFGIEEGTILAKAVLVGKELENAFAPETEEDENGTNQEYEDDGKYLYKYVDAFGNTKYVYAWRLTPTDPTPKGKREKPSLRELEQQIRRDIEDGIDSTGKKMTRELEQQIRRDIEDGIDSTGKKMTLCQLYAKQNAQRANVKKSTQKQREQLMRLLKEDKLGARSIDTIKPSDAKEWALRMKDKGFSYNTINNHKRSLKASFYIAIQDDCVRKNPFDFKLSEVIENDTKEKVALTEEQEQALLSFIKTDNVYHKYYDDVLILLKTGLRIMNNNDIPVWEKYTLTIEEASKYFRIGENKLRRLAEENKDAGWLIMNGNRIQIKRRQFEYFLEEHDALGGLERVGTMLDKARYSTSLSSKLTAHLQRINRTDLIPYIQYDTKHGKGGIAVEVLKLQVPKQQNSLEETQQWLTEGGVISAVKSFYFLEEHDALGGLERVGTMLDKARYSTPETHNHYRSAIKFLYKKVLKTVWDDDISRTNMTIHVRETKGRIDRYTILSQKNLDLLTEYWYDMYRRFRNRRTVRAEFAFLAVIEENTNYRFKLELNKMEQVYSAKLDDKLKQLHSLRHDMKNHLIVIDGYASQHNDKKIHEYIHNISEDLSLTNAVDSGSHIVSALIAEKEDKAKLQNIRMSKTPYICNCDVIHEDIVNDVKSKMQPKDDYIQLASLFKLFGDGTRVQILHALEQSEMCVCDLAVLLGVTKSAISHQLKALRLANLVKFRKEAQIVYYSLADDHVKEIIDKGFEHLWQKMKRIFLLKGLDCPNCSAKIEKEVGELDGVQSSVVNLMKQTLTINVTQTAADTIASQIETIVHSHEPDVEVQEKTVMNVTKSYSLKGLDCPNCSAKIEKEVGELDGVQSSVVNLMKQTLTINVAQTAADTIVSQIETIVHSHEPDVEVSEIVQESYIPEKKQEANESYNNEDKKLTVRLATGAAIYAIGMALTVFAKVPLPIELTFLIVSYVILGGDVVWQAVRNISKGRVFDEHFLMSVSTIGAFVIGEYPEAVAVMLFYQVGEFFQSLAVKRSRKSISDLMDIRPDSATVRRNGELITISPESVAIGEIIIVKPGEKIPLDGVVLDGDSMLDTRALTGESVPRSVHKGDEALSGCMNQTGVLTIKTTKAFGESTVSKIIDLVENASSRKALTENFITTFARYYTPVVVILAAILAILPPILLGGGWTEWIRRGFVFLVVSCPCALVISIPLTFFGGIGAASKRGVLVKGSNYLEALNNVSVIVFDKTGTLTKGVFNVTDILPANGFSKEQVLEYAAEAESFSNHPIAKSILAAYGKEMDQSVISDYKEISGYGISVMAGEKKVFAGNTKLMDTECIEYTTCEKTGTKVYLAVDGQYAGCILITDEVKPDSKKAISDLKHIGVEKTVMLTGDDEKIGKSVAEELQLDEYYAQLLPDQKVEKVELLDGKKRPGSKLAFVGDGINDAPVLARADVGIAMGGLGSDAAIEAADVVLMTDEPSKLVDAIEVAKATKQIVMQNIVIALGIKSVFLILGALGIAGMWEAVFGDVGVTIIAVLNAMRILKKMKRKLILLVVTIVFLVGFGAILHSPPSMIDAVTGATPKSKKAAQASAQLEGSYVLGINMMSDGLDNENTRNKLKELALDDSETNETDLMKTDISFRLYVSETDYPLVSYAKKLCDRLKQAGFSVDLKGYSNTMMLSRVVSGKYDVFLASDDFIDVTTLTQMDYMIMDSEEMRMRKWNTILSVLMLLIFMIHGIMGSFMLNGVGSSAGKLLAWIGVGILVVHTVIGVILTVQSLQTAKQSGKMYLKQNVIFWARRASGMAILILLLFHIGLFGKVQNGTYILFPFTTVKMVTQLLFVAAIFVHIFINIRPLLVSLGIISYKERRSDIYLILSVLLLFIAGAVILYYIGWQYLMSKTIIIIGAGLAGLSAALQAAENGCNVKLVSSLPSERAQSVMAEGGINAALNTKDENDSPEEHFTDTIKAACGLADPNAVWGMTQAAPELVHWLLKLGVKFNMSGYDDVDLRNFGGQKKKRTAFAQSDTGKQIMTAMIDAVRRKEASGMVERFSHHSFLTLRLCGNICCGCVIRDEYSQETVELPGDAVIVATGGMHGLFGNTTGSLSNTGEVTAELFRLGVPLANGEMIQYHPTTVKCGGKRMLISEAARGEGGRLFAMKDGKQWYFMEEKYPELGNLMPRDITAREIWKVSHESEVFLDMTEISEEIISNKLSGLVDDCMTYLHKDIRKEPVSVLPGIHYFMGGILVDEQHRTPIQNLCAAGECCAQYHGANRLGGNSLLGALYGGRVAAKSACEQADVVDLSCATQIDFPPASQISEIKQLNKVMQETMGVVRNENTLLNGIKTVQALTGNLPLLGMAVLKSALARKESRGAHWREDYPKSNDDDYLKTTVARFDGKQIQISFVPVPERRMVYKIRIRRQESQKSDSYWQEFEYDGSKNSSVATVLKELNSRTPLKDNSGNIVTPISWECSCMVRKCGACAMLINERPRLACSTFLHTLKGSTITLEPLSKFPLVRDLIVDRSILFENLKKLNLWLESEAYMNPWTHEPRYQSARCLMCGCCLEVCPNFSANGTFAGAVAAVNAFRILNEEQESTHLNEISAKYKKKYFEGCGKSLSCHDICPIGLPVEELLVRSNAAAVWGRMDDTIGILSIIIIVIQLVFLIGSIFPTEKSLKNNFNEDGTRRMANYTKTTIGKENRIELHEKLSLTGAEISLNELPAGANVPFVHSHKENEEIYGILSGNGKAIIDGEEISLSTGDWLKIAPAAKRQFFASDISGITYICIQVKENSLEHFTAEDAVIDMASEEKQKQEFNSFRNIPDSFKKIVVVNGTKKPWRNEEGFVIMGMKYFLLNADSLEFMIKVTLTNEILKRISEIDEKRFSLSSIEMPPVTKNRLRKNSKKKSSYASNKIEGNPLTEKQANEAIDSDPHKHFLKPEQEVRNYFLALNVLEEKLKKKERFSKEMILEVQAMVEKGASKEKIGLRGPMPPGMLFAVYDSETGAAEYIPPEYIDIPDLLEELVEYVNTTDDHPLIIAAIVHYQLVTIHPFEDGNGRTARLMSGYILDYYGYGFNGIGSLEEYFAYDPDEYYASLQMGLPALYYSGRENPPHPEIWINYFLRMMVLYSKKVYELSKESENDELDGSLSYLNAKEKEFLAFLLKKRLYEFTPIEVSKMLGVTNKTIINRCAKLVNNGLLIPIIVKTRIRSYRLSDFSKTNEKKILKKISMRILIYGAGVIGGKSMKNEEYKKLSIAEFTKAAGRYESNHAGIYEMCKKDYPDILAELEKEPFRELLDAGCGPAPMISLLSEKYPDRHYTGLDLTPAMIEQAKKKDIPNATFVVGDCENFPFENDSFDAIICSMSFHHYPDPQAFFDSVKRCLRPNGRLILRDVTSDNKVLVWLMNTLEMPLANICGHGDVRVPTRDVVMKCCRRAGLKVEKFEIRKGMRMHCVVRKQMKEKVNVTGVPETMVQTLYARAKETKKQNAKIKDEIAVKLVEKLDYDFSKADKDNAMTYGVIARTIVLDRMVEQYLKKHENAVVINLACGLDTRCYRMKGKYLRWYNVDLPETMKIRRQFLPETGPIYQIAKSAMDDSYVDDIDYHGENVLVIIEGLTMYLCEKDIRKIFSIIERSFQKVNVMVETMSPFVVKHVKEKSIEGSNAKFTWGVKNGTELQKIVPNFSILHEVSLVEGMKELMPVYCVIGKIPAVRNISNKIIVLKKRGMQKKHFEMETDGFYGTYWKCKSDSDCAMIAMIGDDSEDYLARTSVKWLHKLGVNVMTMSPAKKDYGHHNYPLERIQKAIRWLKAHGNQKIGIVGASTTGTLALTAASYFKDLTLTIGLTPSDFIWQGFMQGKKDGCKEWPIEGESLFSYKGEPLPYMPFCYKHPDYWHVINEETKRTGDMLNSRKLFDDSEAAHPITEEEMIKIEKIHGTLLLIGAEDDVLWDTAKYIRRMEQRMKERPHTCRLESVIYEHGTHFVFPESMLKTMLPIGSGIFMKLAFQAARKYPKECQRARLDIDQRVRNAVAEWKSAERMVFKTIGNKSNPVILFFHAMGVIGESGMPVAEKMKEKYYCIMPTSTVYCPGQRYQSKRDEIQQIVRFLENHGIKEIELAVASSIGADLAIAFLTETKITVKHVFFDGGQFAQIRKATRRIMVPFLYIVTKSLYWSKGKTLKRIMWCDDDKIKPYFIEAGKNLTYGNLRRQLADSLEDKPFPELSEELQKHTFWEFGSIEEHFKYRNAVMQTYIHGNFPVFEGFNHMQYQIRDSEGFARMLETIIETGRLPNPVVKKGGRNGYMTLQAIHFITSYKSTSTGDDNTAWPFVVVMFAGVSRNYFVVLSILFANSICKMSLSKTQIFLFFESGNYVKECLCLIDTHLVGELFSFFIIMLTSVFGISIKCEAWNHQDSLPVYIAGSYDFHTAYIGNRRCIMLAPTEELATLPALKKQIVKIQQIDNVPVVFELTTVSNYRRKSLIENNIPFITNKQVFLPFIGTMLSDEKEPQKLTGKFVYSTQQLFLFYLYSKKKRLYTSEAGKVLPFTAMTLTRAVKQLETTDLFLVAKDGVNKFIESKYKRDELFEKAKVYLTTPVRKTGYIDKTQVTENMVFAGETALSEKSMLNPSRVVTYAISEKDYDKALLTDELIDPDKQVRLELWAYNPKQFSEDNSADDISLVLSFTDTNDERIEEAVDELKERRLHEMVSGFTKFKERFQGFENQYVIIGGTACDLIMENEELPFRATKDVDIVLIVESITAEFGRQFWEYVKMTEEIETQENNKLPVLRGELALLVVVLINSLGVVLMLYSGSGISAISSVPYAFSEVFNKISLGTWTYIFQGLLVLSLMIMRKKFVAPYLFSFVVGFAFSEMLDVHEMWIGVLPTAIGYRVLYFIISYLLLCIGIALSNRCGLPIIPTDLFPRELADITKVKYSRIKIGYDVTCLTITALMTCIILGHLDGLGIGTILAAFTMGKVIGMIGDKMDQHVRFESFMTKRVMIMVGANSVLTTKVIRENTRKRFTEVAVAVEEIGNSMTLTLKALAEGKQDIEHLASEVEASVDNGTEVTEKLEKALISIIRSIMHLKEQYNKTLMVDIGWISTQSRFFQDKTGFLIFTDSYIKVSKFKALNXXXXPLWWIMVDIGWISTQTRFFQDKTGFLIFTDSYIKVSKFKALNDFKMRGNDEKVVEIEIERLHDFKNHPFKVQADSQMKELQDSISKYGILNPLIVRPRPEGFYEVISGHRRKYAAMELKYTKVLVIKMLSHRHIYYDIMWLCEKNYYLELICLYDKQNGGFARMKVIIINGSARKGNTLTAIEAFVKGASEKNEIEIIEPDKLNIAPCKGCGVCQCSKGCVDKDDTNPTIDKIAAADMILFATPVYWWGMSAQLKLIIDKCYCRGLQLKNKKVGTIVVGGSPVDSIQYELIDKQFDCMAKYLSWNLLFQKSYYATAKDELSKNQDAMKELEDIGKELMLLLTLNMNMFNFVIDDSFNDYFDSISTDIAFIQECRYNRINEQYYAKWAGNYEEPIDRRFHLSVAISKDENISKSNNDLKADYTCIFVKYALKRNLHKNRFLKMSYQVHITSTAEHDIMRAADYIEFTLKNPNAADNLLDAATEQIGSLADLPQKFHLVDDPVLASWGIRFVIINNYLAFYTIDEEKQTVIIVRFLYQKSNWTAILRQGFSLIMPAIKSSADLRNNYNEISTFCHNYPEPVFITKNGKGDLAVMSIEAYEGLTSRFELYSQIKEGMDDIATGNTRPFSEAMADIRSRRSRMGLFTDGFKLLKKASEPLYKTPKSIQETIEIMAVAENGIFEVSKNKYSKCTHRNYPMIELKQYIDNIVLNSNMFFPMLYNNYRNSFWKAVFQNRKIVSDAIWGGCGVDGAIHRAAGPELLTECRTLHGCETGGAKITKAYNLPCDYVIHTVGPIWNGGRNREEELLSNCYFNSMKLARDNGIRSIAFPSISTGAYSFPVVLAAKIAVRTVARFLHENPDSFDLVEWVLFDTQTESVYEAEVTLYYNIRIMVLLVVDAQNGIVDERLYEFRKFVGNIKKLIGAAREQGIEVIYVQHDDGPGTGFSIGDDEFEVYSEFQPMPDEKRFIKSVCSAFKKESGLLEYLIAKEEKDVMICGIMTDFCINATVEAGFEHGLHMXXXXMANRKFTEQEMLTLRNSKYVLDVSPSIVHFSAEFKKLFWEELSKGRLPREIISTLGIDPNILGDSRINGLKTMIGNEVKKGNGFRDLNTYAQGCNGYLSAENRIKYLEMQLAYKDQEIEFLKKIVSLNPEAPEMKIPAHAKYQIIYDTMQKNDNLLNVAAMCEIAGVSRSGYYHYLSTEDQRMEREEQDRQDFLLILKAYQYRGYHKGARSIYMRLLHMEPPIVMNIKKIRRLMKKYNLQCPIRKANPYRRMAKAMATAYTAPNIVNREFEEHGPRKILLTDITYIINGKAPRCYMSTIIDACTKELLSWVLSESLEIGFVLETVKQLIEKHGTDLSTETLIHSDQGSHYTSIKFIQLLKDNELRQSMSRRANCWDNAPQESFFGHMKDELDLSECHGYEEILNAVRDWTEYYNTERYQWDLARLSPVEYYQYLTTGIYPLIIPKAKGKNDQSEASLMKRKVLSVMLCAAMVVSMTACGGSDAKENTASANASVSETEQGEATEQDAQEEEPITCTLTVWSPSEDQDPEYGQWLNKVYPLSRTLMKKINFHTHTNRCRHADGIAADYVQSALSAGVTQLGFSDHAPFPDYDFGMRMPYCELSEYIEDINALTVQYRTDIILWKGLEIEYLPEYRDYYEALLTRSGMDYLLMGEHFYKNASGKTTNYTDALSTDEFPVYAQNVADGMKTGLFLAVAHPDIYMADNFVWDDNCKKAADIIIDTAVTTGTVLEYNANGFRREKKFYPDGTRYQYPHPAFWEMVKGSGARVIVGSDCHNPSQVWDVAIEKAYQNLYALGIHPISSLFDTSDVPSVLCTKSHDEEHSMNIRDIARLANVTPGTVSKVLNNYPDISEATRQHVLQIIKENQYTTKNGGRKFKQAVTPRIGLVSENVYNWVSETMQNLLSVRFHNADYTVLSFQDNYFSQNKNEKFQELLTYIDRHQLTGLIYFGGNFEDVPADSFAALNCPVIFVNTVLPPDNMMTATTYSSVQVNHYETAYWQMESLIKNGHSHICMLISSKIDTSVYRLRWQAYEDALSSHGLSTEYLAESGYQCERAYRELTEVLTMHPEITAICSISDIVTPAAIRAIHDLGKIPGKDVHIISFDGMPSMHYCIPSISTFIQPRDEMAGYIYDLLLGLISDEHQHQHITFQTRFSPGESMTKDEWYRQLFERLDNDINNWIHHYAYKLAVGSSITVIVFTMGNESGEWIMHGMKWDNPDCIHSVDEAIKYINEFGFLPLFKNDIDGFSLEERTVPEYWWSDDPEIDPWMWRAIIARRHDIVYGKFFDKKAGFISKKWLPVFANYRRDGYDFDALYDDGKAPNKHKKIMVNFMEDNADSEIYSNELKKQAGFGKDGEKGFDGAITNLMMQTYLCNCDFKKRVNKRGIEYGWDVAVYSSIEHIYGYDYVTSCYKDSPQDSWKQIVDYMHEMYPEATDKQIRKLLKMPFKIVRNDITKVKADAIVNTANPNPICVSGTDLAIYEAAGKEKLLAERVNIGKIARGDIAVTGAYNLNAKYIIHTVGPVWTDGLHHEFEILEDCYRKSLQKALELKCESIAFPLISTGVYGFPKDKALQIAVSVFSQFLTENEIEIILVVFDKRSFQLSVQIVGDIDSYIDANYVKESHRKEYPVRSRSNTRMRELPEEAFYDEMLPREAEDNYPLEEDTGLAEPCMLSADISLEDQLANIGVSFHDKLFELIDESHIDNKDVWKRANLDRKHFSKIQCDQNYHPKKKTVMALCIALQLDLEQSRDLLARADWAFSPSSKVDLIVQKAIIDEQYDIMQLNVTLFKYTNEILGVMYGAILGDIIGSPFEFDRGDKTKKFDLFSEGCGFTDDSVMTIAVGEALLAVGPEAAVKKIEDAVASNMQDWGKRYPHAGYGGSFRHWLKENNPKPYGSYGNGSAMRVSAAGWLYDSIERTREVARATANVTHNHPEGIKGAEATASAIYMARNGSSKEEIKEYIEREFHYDLRRTLDNIRPYYHHVESCQETVPEAIIAFLESKDFEDAVRNAVSLGGDTDTLGAITGSIAEAFYGIPAVLIAECKSRIDKGLMTDVLDEFDHVLGRSMDTYSDEVDEIQANQMIEAAIDKYYMEKFIYWIKRTLHHSKHCNSLCMLCRYYDECKIDGPVMAMYDWNHNGKNDRQDDYLEYMIYKDCTNDNNSNTNHSSYNSDSAFGMNVFVVIAVIVIFAFIGNAMEESTPKCIKPGCNNEQTQNMLLAMNRPKTCYLHKPYSGGYTSSGSSSSGNSSSGSSSSYSDKSYNSSSGSAGSSSNAYGDDNSGSYSGGSTGSSSYHSSSSSYDSYDEGYDDIYMNGDYDYDRYDSDDDYAAGVDDAMDEDYEEWMKEMYFTIAGCNHYYGSDFMEKGMKVKLVKEPDNEYDNEAIQVKIKGLGKVGYVANSPYTVKGESMSAGRLYDKIGGKAKGKIVFVTDGGVICKVISDGKDKPVMIEEDKVYDEDQLGFKIMMNENKTLEYYNKNADNFAKTTIDVNFYETQKHFQELLPEHGYILDFGCGSGRDTKYFLEQGFYVDATDGSEEMCHIASNYTGIQVRRLLFEELDENKKYDGIWACSSILHLPKNELKAVFMKMFKALKEDGIIYTSFKYGDFEGERNGRYFTDFTEKTFEEFVDEIDNLQLKEEWITGDVRPGRGEEKWLNVILQKNMAERNTAEELDDVYEIKYSTDAMTGGADKIRILMIFASVATLGRVEYLNENYFAPDYFTYVVIDEFHHAVNEQYQRIVDYFKPKFLLGLTATPERMDGKNIYEICDYNVPYEISLKEAINKGMLVPFHYYGIFDETDYSKLHIVRGRYDEKELNETYIGNVSRYELIYKYYCKYGSRQALGFCCSREHAREMAKEFSKRGIPSVAVFSDASGEYTEDRNVAIRQLKQGKIRVIFSVDMFNEGVDITSVDMVMFLRPTESPIVFLQQLGRGLRKCRGKEFLTVLDFIGNYEKAGRVRFLLSDRSNQHAGVYNPSDTSAFPDDCLVDFDMKLIDLFAEMDRKHLKLKDQIINEYFRVKELLGRRPDRMDLFTYMDDGIYEIAIAHSKDNPFKKYLEFLKELDELNQDEEVFYKGIGREFISLLENTSMSKVYKMPVLMAFYNHGNILMEVSEEQLLSSWKEFFSTGTNWKDLDKNMTIQKYNSISDEEHLKKILSMPVHFLLESGKGFFVKKDGVAIGLREELRPLIDNPVVVCQMKDVIDYRAMDYYQRRYRQSQEDMRNNRNSIIENVILFLVAIGVFAIIGGFAGWWSGSDDEEYYDYDYSPSSSYSSHSSSSYNSSGSSGSSSYTPKSYSSGKYNSSSSSESSTNSSGSSTDSYSNSDSSSTYSGSSSSSSSGSKKYYHDSYDDGYDDVYMDGDYDDDRYDSDDDYAAGVDDAIDDDDEDWMVEMKAFRMMENREDAAVARATVGMIMMAKSKEGGQSETIMRLFKKKTVTKAYDKENKKPVIKASICNGEQVAGFKNIHTGKIEEVMLIKNQADLDAFKKMYGIDGEIEKEYMSTSGILESLIEKDNGYLITSKAVESGVSKPSVSKYVREHDMEKVAHGIYILDDVWPDELFVLQQRNKNIIYSGETALYLHGLIDREYSHICFTVPTGYNATHIKKKNKEVRYANPEILDMGTCEIPSSSGNLVKVYDKERCICDLIKDRKKYEIQLYQTAIKEYMSSKEKNLSRLIEYAVKLGVRDEVMMYVEVMVMIHTAKQLKDKVKNMSGGNSEVAQALIRTYFMERFLERVSVSEYRNNFILKGGMLVASIVGVDMRATMDIDTTVKALPLNEKDARAIIERIGELQLEDGVNFKITSVKEIMEEFDYPGIRMMIEANLERMRQPFKIDISTDDAITPSAVEYKYKLMFEDRSISVLSYNLETLLAEKMQTILARGLANTRMRDFYDVYEIMNSKADQISFDVLKKAFVATCMKRETSFGEEEVRETLDKIKDDSGLEEMWNRFKRVNYFVDDLTWGEVSETIVEEIPIVLEDFLLKNFNIMTSGKCLLWFAVTVGFVNRCNKKFYAVWIGYDKIMSNTFGNSIEDMCKAMMPYDGYGRDEGFPHDGKQGRCGCGEGYSWDDNDGGYRGGSYKGSSGGGNGTGLLIFAICLAAAVGVFNELLGVIILIVFAFIIWTKNMVKKIMRDPLFLAQKSVDATEDDKQVVTDLLDTLKANLDHCVGMAANMIGVKKNIIVVAAGPFQFAMINPVITGKSGVFQTEEGCLSLDGVRPCTRYKEIEVDYLDQNFKKKHGKYTGWTAQIIQHEVDHCNGVVIMKLKNILIVVDNIEESIHFYNELFGLNVISRQEGNVIMSEGMVLQDAGIWKESMQIQTIPYNNMTELYFEDNDIEGVVKKLESGRYEVRYATALTELDGGQKLVRFYDPSGNLIEVRTPWDKFVNREMKRLEKMQIFADAVDYKLISLCHRGDIVVSQDYGETPMERHLNKKARRSSHKNHIKGPKKRTEEDDERFAQSFEKMILMAKSKEELRNTERMIKNIVFDIGNVLVRFQPDEAMREIGIEENKIAALAHATYENPVWVELDRGVIPENEIIDEMVKVAPQYEADIRRFFKEGKAFVVKAFDYAADWIKELKSRGYKVYLLSNYPKDFFELHTHSELSFVSLVDGKVVSAMVGMIKPDAGIYQCLFDKYNLNPKECVFIDDRPENIEGGRKLGMEGIVFTDYETGKKKLEQMLMAKSKEDMKTAIVYASVHHGNTKKIIDEIAKTNDVELIDATQTVEKDLSEYDLIGFASGVYGGKFHQSVLKFASVNLTDNKNIFLICTYGGRPVFKSIEQVIAYKHDNIVGRFSCKGFDTFGPFKLIGGVSKGHPDEKDLAAAVEFYNGLTEQPEFLKMKKRITLIVFSVLIIAALYVLYCFNYIPHKKYTNADFNIEAYKSNIDKDNDGIDDQTDILNNANNYIKTNPKYKSKYYNTGYPDDEYGVCTDVVAFALKDAGYDLMVLVNEDIKNNKELYDIDAVDKNIDFRRVKNLKVYFDNNAISLTTDINETEEWQGGDIVVFKKHIGIISDKRNRKGICFVIHHANPYQIYYEEDILEHRDDIIGHYRISMDKLKKNMVFYLLLLIDFYIVPWFIKNTGSAMIVMLVIIPLICLITSVFYGIRNGFNFWYILIVAIMFAPSIFIFYNSSAWVYVVGYAVIALLGNLIALPLRKRMKKVIYLLVLCMVLGMAGCGTNQENKEPVSGNVSVEIENKENDDVVQNEQTADTGSYPPCVMVDGVIYKDTGYVASMPGCGTMDGEIVSTVAGTELPSENNQSNFGSGYHYQRSSEGQLIVVIDDERIIFRDIEKDDTSIPIEVINFNAKVKEITDDGELLVTHVSTAEGFCQMNDGEYYVSAENLAEDVQVGDIVTIWFNGMIQETYPAQLGVVYRIIKTQMLKKLNSFFNIVIGSFIGVFIGFGIYKFWHFNTYPNLYAMQSAPWYTELLLGGALVAVVVVVCIILKLIICRKLKPMKKELRILVILIAVLLVGTVGYYFMPKKFGKNVNPSEVDHINVFDGNTGTGFTITDSEDIEYIVANIQGISMKRDGISLGRTGYSFKISYINSNDKDIIPVFILNSDNTICKDPFFYRCDGGLCFDYLKACEEKYRTNVTESIEEKMGFWIFMLIMDLLLPFTMIGFGRYFMKKAPKEINSVFGYRTSMSMKNKDTWEFAHKYCGKVWYVCGMVMLPITVIFMLLVIGKNEDCVGSIGGIICGVQLIPLIGSILPTEIALKKNFDKNGTRRMSNKLVEHKESKEILTGNQKKILFWICFIILSIAFITVWINILLTSKAFNTQMEEMVLGEDYYMEDIVITGKRAEDASADTISQNYFFYYNNGKVNDYHKRMQVPGFVYSEYNVGDSIAAYTTDHVSYSYYKYGILPDTEYTNNELMKVAGVLLGIGIFLLALFGVLSKKMNYKKMKRWLSILAVFGCIVALSGCKNENEKRQAYFNAKVLEINKEYVDVRCIEAFNSGISVDEEFSVTKDVVSAEGVPELNVDDNIRVVFNGDVMESDPLQIGTVYAIYLLDENGEVIPNNMRVIISIILMVIAALVGFFFGAGMNEAMGGAILLSMITGFACTINAIEKNKKDMKEYQYLIGKIIVAVTIIVAAIIIAQAIGGAGESIRSSLLQLRDALRMKKAIIMMIVVFALVVWPFSGVWQLLSGIIGGGVRESFIYPIYGGIILLSGIIVVCTELILEEIKSLKDDIKDKKEGCMSRILLVEDDTMIASGILYALETEGYETNHATGIKDAGSLIQHYNFDLAIIDMQLPDGTGFDVSEIFKNNATSVIFLTVVDDENIIVRAFDEGAQDYIVKPFRIRELLARVRRILSANIKNGEKDNIIYMGHAAIHTDEAKVYVNDKSIELTALEYRLLLIFASNKGILLTRQQILDKIWDADGNFVEDNTLTVYVKRLREKLGEAIHIETVRGMGYRVDMWIKKKEIEQLSEFVKGYSSGEELDIRVNKEGSFNILKNDIYALVNTKNEQIKAVEAERDSLSDYMADISHQLKTPITSMMIMADLLEEAEPEKQEEFIHNIQVSLNKMEWLVGALLKMAKLDAHAIDFIKNDIRTSELLEAVKPSVEILLDIHNLTIELKQDCIIHCDKRWTTEALTNIIKNAIEYSPDGSVIEIDSGENPMYSWISVKDSGMGMDKTEYAALFKRFENSTNENGFGIGMPLALSILKGQGGDIDVDFGGMGEGTTFILKFFKMAVLEVKELTKKYGEGESEVIALDHVSFSVERGEFVAIIGASGSGKSTLMNMIGGIDYPTSGSIIIDGNEIQAMSEDELAIFRRRNLGIVYQFYNLIPTLTAEENIALPWKLDGRKENKERLSEIVNMLGLEKRAKHLPGQMSGGQQQRVSIGRALINEPAFILADEPTGNLDSKTSREILDILKFTNQKYKQTILLVTHDEKIALQANRIITIGDGKIIKDEVMKMKITAQLALSQMKVNKKRTIAGIFAIALATSLITTVMCFVTSANKMLTDFLGSDYGEYGGAYFLMLAIPALLLGLLIAAMSITVISNIFSASANKRIQEFGILKCVGATGRQIRVSVIYESLWLSLTAIPLGLIAGTILGYISVKFTGHFISDINDAAKEIIMRPFTFSLPFHISVWTYLFAGVFSFCIVLFSAYRPAKKVGKFTAIQCVKGIGAGTVLKEIQVKDSFIQKIFGCESAIAYKNMKRNKYGYKATIRALSLGILLFLLTGGLSGQAKEFQEWMTPKSKEMMVDYSSNYDIEVNAKTGKEERKISRPVTSDQYNAIAQKLEKYGIDVYGVGADTFTYNALLDKNTLTEDMLQVPNFSDGNGETRTEIVSVDYVLYKKLCDRAGAEYGSILLLNTYQYNDNGEYVSIKPFKDDVTQISLINAANEKNTLTIGGILEQSDLKEYGFGEMTPYPVRIVVPDADARSFDWFSMPSDEDDYTEYARSVMDEYYPIAAEDSYVEQGYTVRIARTDAMIKMLNIAIVLAEIVMYGFVILLVLMGFTSVISTLTTNIRIRSREFAVLKSVGMTNKSLCRMLYSESVFCVLNALVPGVILGIAIPFLINLSIRKAFPVLYHIPWAALFGGIFVLIGIVFFITRAEIHKLRDKSIIDEIRMDIVMAKWVCTVCGYVYEGENPPAECPVCHVGADKFKKVEGDLTLAAEHEFGVYASTVKNNPEISDEDKKYIFEQLKANFEGECSEVGMYLCMARVAHREGYPEIGLYWEKAAYEEAEHAAKFAEMLGEDLEPNMKATTKDNLAWRVDCEFGATAGKTDLAKCAKKNNLDAIHDTVHEMARDEARHGRALKGLLDRYFGMIKYSRQRESIVNFLASRTDHPTAETIYQNIKKEFPNISLGTVYRNLSLLEEIGEIIKISTGVGPDHYDYNTAPHYHFICRGCGRVMDIDLDFADELMTQVQESTDLAIESCSVSFTGLCPDCKNELSMKRFVTYLYLYDGRIKGNNAGFIKVEINGEKSAFLVQIKNLGKYSGKGRVYLIYEAEAAIEAGELTVKNGEAREIYNVDTENVKDSGKTFLQVLGVKIELENADEKFLASCWTDNTEAVIGKPLKVQADLSNKKNPVSTPMPEPGCQKEVHSQNVDDSQDKIRRIDISELRTLPAKNWYIVNNSFLTHGYANYKHLVIKTDTDGRQYLGVPGVSEPQERMLAGIFGFTEFEPAAPANAADVDSGVFGYWFCQLMKNYSKDPDRQYHIQVAKGEVGRYVIMPGDPKRCVKIAQYLDNPVLIADNREFITYTGTLDGVKVSVTSTGIGGPSASIAMEELYRCGADTFVRIGTCGGMQTDVKSGDIVIATGAIRMEGTSKEYAPIEFPAVADLDVTNALVAAAKQKNFTHHTGVVQCKDAFYGQHEPEKMPAGYELINKWNAWRMLGCLASEMESAALFVVAAKLGVRAGSCFLVVANQEREKLGLENPVVRDTDMAVQVAVSAVRNLIREDCAGEMDINEILKHVDHTLLSPQATWNEIRQICDDAIKYHTASVCIPPSYVKQASKYLGERVKVCTVIGFPNGYSTTAVKAFETEDALANGAKEIDMVINIGWLKDKRYELIEDEIKKLKSICKDKVLKVIIETCFLTDDEKIRMCDIVTSAGADYIKTSTGFGTAGATFDDIKLFSEHIGEGVKMKAAGGISSLDDAERFLELGADRLGTSRVVKLIKAMDMDKKTIEKLIDTALAQLDFSYAPYSGFNVGAALLAKNQAVYTGCNIENAAYTPTNCAERTAFFKAVSEGVRDFEAICIVGGKNQKPTGYTAPCGVCRQVMMEFCNPKTFKIILAIDRENYRIYTLEDMLPQGFGPANLEMEREENIRDNIIKLPKIELHCHLDGSLSREFVEKRLGRTVQEAELSVSDDCTSLAQYLEKFDLPGQCIQDEKGLEGAAYDVLKGMHRENVVYAEIRFAPLLSENESMSCERVIEAALKGIERGKKDFGIECGLIVCAMRHHSEEQNRRMLHTAREFLGVGVCAADLAGAEVPYPMSGFMELFKYAKQLGLLFTIHAGECGNAQNIIDAVKAGAARIGHGIAMRGHGDLERQLSAKGIGIELCPISNLQTKAVASADEYPIREFLDAGLKVTINTDNRTVSNTTLSKELEFIEKTYGIRDEELPLMMKNALDVAFADDAVKERIFRQLVMKKYNRIFVIVLDSLGIGAMPDSERFGDTDVDTFGHILERMQTLDIPNLTRLGMLNLHCGGQMQPTAEPIGRFTRLAEASNGKDTMTGHWEMMGIKTEKPFKTFTEHGFPPELIAELEKQCGKKVIGNKSASGTEIIEELGEEEIKNGSMIVYTSADSVLQICGNEETFDLQNLYRCCEIARKITLKDEWRVGRVIARPYVGKKKGEFVRTSNRHDYALKPTGLTALNALKDSGLDVISVGKINDIFCGEGITEAFRSKSSVHGMEQTIDICEKDFKGLCFVNLVDFDALWGHRRNVTGYGEEIEKFDKNLGILMEKLRDDDLLILTADHGNDPTYKGTDHTREYVPFIAYSKSMKGGGAIEEEATFAVIGATITDNFGVKMPDGTIGHSILEELMNSIYEKLTTCLASVREKTDFVPETAIVLGSGLGDYAEQIKIETTIDYKDIKGFPTSTVPGHKGRFVFGYVDSVPVVIMQGRVHYYEGYSITDVVLPTRLMGMMGAKKLILTNAAGGLNTDFNPGDFMLISDHIATAIPSPLIGANIDELGERFPDMSEVYSRRMREIVKEKADKLGIKLREGVYVQLTGPQYETPAEVRMCKILGGDAVGMSTACEALAARHMGLEVCGISCITNLAAGLSDKKLNHKEVQETADRVAKQFTELITAVVRAVMYEIDRMPDFYTVKHLQKVLRYEYNMAVKSQLFRFYVFEKENPYRIIGTVCIHNIAPAFYGSCEIGYKFSSEFHHMGYATEAVGFCTKLAFNELRMHKVTAVVHPGNVPSMKLLNGLGFVQEGLLRDYLMLHGQWCNHYIYGLVNKMTQDEKYMKQAIKQAKKAYALDEVPIGCVIVAGDKIIARGYNRRNTDKNPLAHAELSAIRKASKKTGDWRLEECTMYVTLEPCQMCAGAIVQARIPRVVIGAMNPKAGCAGSIINLLQMQQFNHQVQTDIGICGDECSAMLSTFFKELRKKRKLQGQMIQDIAPHTWDITYKNIQPDPDSRVLFFSRGQLLVQQASDKPADESNEDIHQISFPRYDDIKTECHDAKYQYLFTLDDTAFFRVALSHADKMHILEVTGGKFINRHYMRSTAPKEYVLAAITGFHLDGWYDKNHFCGRCANRLVEDDVERMLRCPVCGNMVYPRINPAVIVGVTNGDKLLLTKYNGREYKKYALVAGFNEIGESLEETVRREVMEETGLRVKNIRYYKSQPWGFTDNILAGYFCEVDGTDEIEVDMQELSMAKWVSREEIPTSLEELSLTNEMISVFRLDKGDFMKISTKGRYALRLMMDLAENNTGSPISLKDVAKRQDISDKYLEQIISILNKAGYVRSVRGAQGGYMLKMEPQNYTVGMILRQTEGSLAPVACIEDDEIVCDRQQQCVTSIVYKKINDAISGVVDNITLQDLVDWQNEKNGNYVIMSRLIYLDNAATTQVYPEVVDAMLPYFTEHYGNPSAIYSFADEAERAVDHARGEVADLIGAKKDEIYFTGGGSESDNWALKATAEAYAAKGKHIITSAIEHHAILHTAQWLEKHGFEVTYVGVDEDGKIKLDELKAAIRPDTILISVMAANNEIGTIQPLKEIGEIAKEHGILFHTDAVQAFGHIPINVDDMHIDMLSASGHKLNGPKGIGVMYIRKGVKIRSFIHGGAQERQRRAGTHNVPGIVGLGKAVELAKANMAERSEYETKLRDHLIERVTSEIPYTRLNGHRTDRLPNNANFCFRFIEGESMLILLDQAGICGSSGSACTSGSLDPSHVLLAIGLPHEIAHGSLRLTLSEKTTLEDIDYTVDKLKEIIARLRSMSPLYEDFVKKNGKSEAMAYSEKVMDHFNHPRNVGEMENPSGVGTVGNAKCGDIMRMYLDIDDNGIIQEAKFKTFGCGAAVATSSMATELVKGKTIQEALEVTNKAVMEALDGLPPVKVHCSLLAEEAIHAALWDYAEKNGIKIEGLEKPVNDISEKEEAPEEDYMKKKVVVGMSGGVDSSVAAYLLKEQGYDVIGVTMQIWQDEDVFKQSQEGGCCGLSAVEDARRVAAVLDIPYYVMNFKADFKKYVIDYFVSEYERAYTPNPCIACNRYVKWESLLHRSLEIGADYIATGHYARIAQLPNGRYTIANSVTAEKDQTYALYNLTQEQLRRTLMPVGEYEKPQIRRIAEEAGLPVAHKSDSQDICFVPDHDYASFIENETGKTYEPGNFVDESGNILGRHKGLIHYTIGQRKGLGITAATPLFVKELRPATNEVVISTNESLFSDTCYISDINYMAQEHITPDTRSIGKVRYSHRGADCTLTPMENGMIKCVFDEPQRAMTPGQAAVFYQDGHVLCGGTIEKMMVNMNQKKIGSFLKELRKEKGITQEEFAENLNVSGRTVSRWETGVNMPDISLLVDIAGFFNVSIPEIINGERKSEIMEKEVKEVAEAMSNYAGAEKSVILKRVKLISIIGLISLVIGLVMEAINYDSMIPIYECMKGTCLGLGVGALATMVLYTTGILEKIKNRKSKQMKIVAIFGSGIIAICIIVSLILTIIEFLSMDNVKNDAYYIKRLKQDLEFVVTHMKNVDIEELNANEVLLDSMLFRMIQISENAKKLSDEYKLHRGNVPWNAIYGLRNRIVHDYGNVDRKRHMGELKSLRIERKLTQNQAADILGVSLRSYKSYENDEKKADSIKYKYMLEKISEINPIDEENGIVDIDYIKRKCSVVFDKYNVNFCYLFGSYSKGKAKPTSDVDLLISTDATGLKFYGLVEDIRTALHKKVDVLDINQLKDNFELTQEILKDGVKIYGMLVGREKELHLLHDIQNDDSSHFVAVYGRRRVGKTFLIREAFGYRFAFQHAGLSEGGMKEQIYAFTSSLKDAGYEVKKQPQNWLEAFEALKDVIRLSSEKKKIIFIDELSWMDTQKSDLMVALENFWNGFASARKDIVLIVCASATSWMLSKVVHNKGGLYNRLTEQIHLRTFCLRECEAYVKAAGLALNRNQILQYYMIFGGVPYYWGFLKKGLSLSQNIDSILFEKDAPLRDEFKYLYASVFKKPENYVKIIEALGTKKVGMTREEIITATKIPNSGDLTTKLEELESCGFIRKYNAFGMKKKNAIYQLMDCFTLFYFKFLKSEPTDEHFWTNQINTPAVNTWLGLAFERVCMEHVDQIKFKLGISGVLTEVNSWYCKSDPDNGIFGSQIDMLIARKDQVINLCEMKYSQSEYTITEKVDRSIRNKISDLRVVSGTKYAIYPTLITTYGVVENSYSQELQSVVMMDDLFAMSNIYQGTLGLIGNTPLVELTHVEKAYGLEARLLAKLEYFNPAGSVKDRIAKEMIEQAERDGKLKPGSTIIEPTSGNTGIGLAAIAAAKGYKIIIVLPETMSIERRNIIKAYGAELVLSDGTKGMKGAIAKAEELHEQIPDSFIPEQFENPANPEAHRKTTGPEIWNDTDGQVDAFVAGVGTGGTITGTGEYLKSKNPDVKIIAVEPETSAVLSTGKAGAHKIQGIGAGFVPNTLNTEVYDEIIPVSNEASFEYGKIIAKEEGVLVGISSGAALYAAIEVAKRPEFKGKTVVALLPDSGDRYYSTDLFKDYIQSLLGHVDPRSTDVYLHVSNKTLLGIRSPFDNPEGGESMSKDCTIQDVFHHFYPSFESTHDISPAQRKAAYHIMNCKTGAFGVNVSVCEDCGCISVHYNSCRDRCCPMCQEFPKEKWVDARREDILDAPYFHVVFTVPEELNPIIYSNQKFLYSALYHAASDTLSELAADCKYLGTDIGYICILHTWGSTMNFHPHIHAIVLGGGLDVKNHWKDNGKDFFLPIKVISKTFRGKYMAELKQLWENDRLEFHGSAAPYKNHYTFKELLNTCYTKEWIPYCKKPFDGAESVIRYLGKYTHKRLEGRSPETHNHYRSAIKFLYKKVLNTVWDDDTVPAMKRERNLPAVLSRDEINAIIDATPNLKHKAIIATMYSSGLRVSEVVHLHYDDISRTNMTIHVRETKGRIDRYTILSQKNLDLLTEYWFKCGRPKDILFPMYKDIFESIRNEAEKRNLRERTIQLYCSDVSYFLRWIGKNVSDLTLEDAESFLTAKRLEGRSPETHNHYRSKMYFVKNNPKDCRCERHRLNIPTLGWVRIKEKGYIPTTKDGWKIKSGTVSIKAGKYYVSVLVEIPDAKIANNSNDGMGIDLGLKDLAIVSNGKTYKNINKSARVKKLEKKLRREQRCLSRKYENLKKGESTQKNIQKQKLKVQRLHHKIDMHQTHFCKKGVSINLITLLLLVHVVYIGIRCYVMDMCYDGTLSTAFGLSSWLFTEGEKHGEMYIGFDSKKKKMVDIRDKNASNVTKLILIIFYIVIFKNTELPNSFFIRFASKNEALLDRRNMDFIGTASQLTGIVAVGFAYEAPAKRPRKPLEEIVEYRMIYLSSFRLSKRKVNNPNIYPYNVFRDKYIEPFVFRPITVLYGNNGSGKSTLLNIIANCLQLKGKEYATSNSFGSVDYCGSFSRECLYTLGEDDYGNTINKLPENSRYIKSEDILYEIKKIQQKQILSDGMEYDYVKRGMSLLEAKKFLASKEGCKQEEYIKFAQEKYSNGETSMQYFEEYLQPDALYLLDEPEVSLSLANQVMLAEEINKMARLLECQFIIATHSPFMLGTLNAKIYNLDTKEYDVTKWSDLDNVRYFYNFFKKHEDEFKVMYNENYSIIFSSMTGNTRKLADKIHEILPKESCDYFGTADAQGIKSELLYIGFWTDKGNADSDTLDFLSKLKNKKIFLFGTAGFGGSDAYFQKILGNVKSAIDSSNTIVGEYMCQGKMPQSVRERYVKMKENPEHSDNIDALIENFDKALSHPDSDDLERLKNIIIMYNFTFNIPTKIHFGKDTISSLSELKAYGSKVLLVYGGGSIKKNGLYDTAMKILKDAGLTVFELSGVEPNPKIETVRKGVEICKNEGIDMVLAIGGGSTIDCSKVVAAGARYDGDAWDLVLDGSKVKAALPIFDVLTLSATGTEMDPFAVISDMSKNEKWGTGSPYMVPTMSILNPEYTFSVSKKQTAAGTADMMSHTMENYFSMENADCQKFMAEGLLRTMIKNGPAALAQPDNYEARANLMWAGTHAINGVVGDGCSPAWCVHPMEHELSAFYDITHGEGLAILTPAWMEHILNDDTLPMFVEFAKNVWGLSGDDDYALAHAGIDALKKFFFETMGIPANLRAVGITDDRNFEVMAKKACEGSKGSFVPLSKDDIVEIYRAAFMIKNLAGRLKELRIQNKLTQKQVSELLGISPSIISGYETGERTPSAEILLSLSYLYKCSTDYLLGKSNDMPAILLDTNGLTPSQIKAISALIESIRQMDDYRNKKRQKMRARRRRAQRIKMTGMCIATLIVFIFIVFLAISNLSKIKKNVTLEAGSEINIKDFLKKENADAKFVTDVSQINTGNIGSHEIVVKVGKKEYTSKLTIEDTKAPTAKANDVTVNKDGQIEANQFVTDIKDATKVDVSFKDKPDVSKDGESEVIIVLTDEGKNQKEVKAKLTVVSDSEPPVIEGVKDITAYIGETVSYKKDVTVTDNMDQNPTLDIDNSKVNLNKAGTYEVVYTATDSAGNTSSASSKITIKEKPKGYVDKEDVYALAQKVVDQITNDSMTDMEKAFAIYRWTKTNIGYTGTSNKDSWTIGAYQAFTKKSGDCFNYYAAAKAMLDVCGIQNVDIVKSDTSHSAHYWSLINLGDGWYHFDATPRKGGGNFFMLTDAELAAYSTKHKNSHIFDSSLYPERATVSVQDKINYAKGTINKMRLGIIGGLGPMATAYFMELLINMTDAKCDQDHLEMIIYNCPSIPDRTAYILGKSNANPVVPIIKIGKKLKEQNVDCISIPCITAHYFHDEIEEKTGCKVIHAIRDTSYMLKEAGLTKIGIMATDGTIQSRIFQNEIEKNGMHGLVPDKKYQRIVMDIIYKDIKAGKIPDIEKYNVVATHLKNKGAQVIILGCTELSLLKKQYDIKTGVIDAMEVLAKSSLIQCNKRVKPKYNKLFVPFNMQITNVLEYLENTVKRVPDKTAYANENMEMTFGEVYHDSRAIGSYLANNNYYKEPVVVFMKKHPHAITAFYGCVYGGCYYVPIDDEMPEFRIRLIFENLHPRVMICDDTTINAVEKFDYNGEILLYDHVRKNEISDEQLLGIRDRQLDTDPIYIVFTSGSTGVPKGVVACHRSVIDYIENLSEVLRFNENTRFANQTPLYFDACLKELYPTLKFGATTYIVPKSLFMFPIKLVEFLNEYKINTVCWVVSALTMISAFKTFNKIKPEYLHTIAFGSEVFPIKQLKIWRETLPKARFVNLYGPTEATGMCCYFEVDREFELDEVVPIGRPFHNTEILLLDENNKLVEDGNVGEICVRGTSLTLGYYNNFEKTSEVFVQNPLNSRYPELIYKTGDLGKRNERGELIFVSRKDYQIKHMGHRIELGEIEVNVNMIEEISTSCAVYDKEKGKIVLYYIGELEPDKLVRILKDKLPRYMIPNKTEKLEQMPLTANGKIDRVFLMKKAQERMNELLEILKELHPDVDYENCTTLIDDKILDSFDIVSIISEVSDSFDVAIPAEEIIPENFNSAKALYDLIVRLEDEMLFTSYSFIAFMTIVFVLYYLVPKSCQWPLLLVFSYIFYFIADPRYLIFILVTTISTYLISLKMNQINMAQDKFIKEFKGNLSREQKKNYKSHMKHKKWIWLLICLFINIGILSVTKYTNFVIQNINDMLHGVSGLHTVNMIVPMGISFYTFQTMGYIIDVYRGKQSVEKNFFKLALFVSFFPQLVQGPISRFHDLSETLFSKHYFESNVVVSGLMRILWGYFKKVVIADRIITGVTTLIHSPSEYQGAYVFIAMLFYAFELYCDFTGGIDITIGIAEVMGIRVTENFNLPYFSKNIKEYWNRWHITMGTWFTDYIFYPISVCKPMLNLSKFSRKHFGEVIGKRVTVYLSAFVVWFTTGLWHGAAWNFIVWGLMNFVVIMVSQELEPLYEKFHKRFSVKGKVPYEAFQILRTFLLMSCIRMFDCYRDVPLTFKMVGTMFTKFNIGELFNGSLLSIGLSVADYVVLIVGFIVVFTVSLFKVRVGNVRTVLLQKPPIVYFGIMAVMIMLIIVFGAYGIGYDSSQFIYNQFMRRKKITACILVAVLLIGALYIVQRLLVPKYQTGIVEGSMVEEYYKDRSDHEVLFVGDCEVYENFSTIELWRKYGITSYIRGSAQQLTWQSYYLLEDALKHETPKVVVFNVLALKYNEPQSEAYNRMSIDGMKWSMSKVNDIKASMTDEENFVDYIFPLLRYHSRWSELTKDDVKHIFSKDKVTHNGYYMRVDTKPQQEFPDPTPLTDYKLGDKAMGYLQKMTDLCKEKGVKLVLIKAPTEYPYWYEQWDEQVQQFADENDVDYINFIPLQNDIGLDMSQDTYDAGLHLNTTGAEKMADYFGKYLVENYNLTDYRNDSEYASIWDKKEAAYDSMKQQQYDELNKYGELKSFGANAIQNMKKIISIMLCIMLSVSMMTACGSKESDNDKKDVGSETKQDVFTYDLKGVTVAMNENMEPLVKKLGDADNYFESDSCAFQGKDKVYTYGSVKITTYPKDNKDYVYTIELLDDTVSTPEGISIGSDKKAVEEKYGDASDSTETSYIYKKGDSQLSFIFDGDNVSSIVYNAITEMKKTKIIACICLIVLIVVCSVLSTKEISKHKNDSSQNVSDDINIQKKTTIETSELQEEKSDIFVPSTDDKTVDVSSDNNIVSQYAVLVNADDGAIIASKNANEKMYPASMTKVMTLLVAAEKLNNESLGQKIEISIEATDYSFKNDCSAAGFLVGEQVTIEDLLNGIILPSGAEAAYQAAIMTSGTLEQFVDDMNKKVQELGISQTTHFSNPVGIFDENNYSTACDMAVILHAAMENEICKKVLSARNYTTSCTQQHPQGITFSSKFLNRIDRKFGKGKVVGAKTGYVNQSRYCAVSMYESESSNKYICVTGMAGKAWQTVYDHIAFYQNYCKMKKILILLLCLLLTASITGCGTQSIKPIDTIEGNMKTYSEMSDGTWQCDGHIYKYRLEISGRLSNAVKDSTYIYLSNIEDITFEQAWKASGLSSNMDDYFDIDEAVLVELPDMKKIVCIVILILAITGLLNGISYLISGISARGIGGVNYGRVIFPLLVGAIAVYFLKKEKKKMYKDIFESIRNEAEKRNLRERTIQLYCSDVSYFLRWIGKNVSDLTLEDAESFLTAKRLEGRSPETHNHYRSAIKFLYKKVMSISPQFVXXXXSLSVRNDASFIVDARLSIYEHQSTVCPNMPVRSLIYFSVILSDMLSDKKKGTKKGKNIYGRRLVKIPTPHFVVFYNGEEEQPEVQELKLSDAFEKPTDEPNLELKCKVYNINDGKNKAIMEMKTLHALIAGRHLIMPHIFTEHIVISVINVPTTAQVAIEKLLMDKVFKIEDLRPIRDEMTVSRNSRLSDKTPITYFSLGKGTSISQESYDNTTVYIGAKGCADFLIGAYAAKHTISEGDMLVVPSKILCGVTTETGCIYTEIIIKKENNNMNKIIKSGEVMKLKDLISYEDGSITNIDVVSNDTMKFVLMAFDEGTGLTPHRAPGNAIIFALEGKAVIDYEGKDYTISAGENFRFDKNGLHSVTADERFKMGLLLVLEMKDLTKGKPSRLILAFAIPIFMANILQLTYSIVDTRIVGSYLGENSLAAVGATTTLSNLMIGFLMGLANGFAIITAQKFGARDYAGVKKSFALSIKMGCIIALAITVLCLLFLRQILGFLNVSNDLMGMAVSYIFIIIAGLVATFLYDACAAALRALGDTVTPLVILAVSVCLNMAGDIFFVVVLKAGVAGAAIATVLAQVIAFIVCYVYMVKRYELLRLSRSDLFDSHLLRRSMKLCGENCDIEGAEGKGSKNNMTPEVIAVMKMTMLKAGLSMAFMSSLVNIGSLTLQTAINRLGQDIIVAHTAARKISEIFMVMFTVFGQTMATFCGQNIGAGEVTRVKKGIKLAIFYTCIWCTMAIIASYTIGPWLVKLVTGTNNPIIIKNATNYLKFDTLFYYVTAVICIVRNAMQGLGEQITPLVSSSLEMVGKIIIAFTLVPLLGYTGVIVAEPLVWFIMVIPLLVKIYTMPVLRKQGHGIMAYALTSTETILVKASAYFYPPLYSVYITYDTYKFNTCKQNAYKLYVYKYSVYKLYIVVYILVMNNDIKYKLANAMKECMFSSPVEKITVKEICDTCGVTRQTFYRNFQDKYDLINWYFDKILIESFHQMGEGSTVYESLVKKFEYIRMEHLFFKAAFKNDEQNNLKEHDFELIRQFYIDQIEGKSHRKISDKLLFQLEMYCQGSVFMTTQWVLGNKNFTPQELAGLLADAMPKELADVFREVNLIMANRIMLNETSYHGSGAIQEIATEAKAHGFKKALVCSDPDLIKFGVTAKVTDILDKNGLEYELYSEIKPNPTIDNVKHGVETFKKSGADYLIAIGGGSSMDTSKAIGIIIANPEFEDVRSLEGVAPTKKPCVPIIAVPTTAGTAAEVTINYVITDVERKRKFVCVDPHDMPIIAIVDPDMMSSMPKGLTASTGMDALTHAIEGYTTKAAWEMTDMFHLKAIEIIARSLRSAVANEKEGREGMALGEYIAGMGFSNVGLGIAHSMAHTLGAVYDTPHGVACAMMLPIVMEYNADCTGEKYREIARAMGVKGVDDMSVEEYRKAAINAVAQLSVDVGIPTKLEAIKEDDLDFLAESAHADACAPGNPKDASVEDLKALFRKIMMDINFEYYKIFYYVAKYCNFTKAARALGNSQPNVTRAMNNLEQQINSILFIRNNRGVQLTPEGERLYAHVSAAMSQILAAEEELSDSTGLSHGSVSIGASETALNIYLLDRLKTFHMAYPGIRLKIYNHSTPQAINAVKNGMIDFAVVSTPVEVEVPLKMIKLGSFQEILVGGTTFTALGSQTLSLNELHNYPLIGLGRETMTFQFFNRFFMSHGLEFAPDTETATTDQILPLVKSELGLAFMPKPMAEAAIANREIVEIALEEEIPQRNICMVYDIHHPISAAARELKKVITDSSKIMSEKTMFPREDHADILFQKILNDPWACDRLMETFNENLVYNDEFDVSLPAEKFAKALFNAYTNRDLSALLMCLCNNTVFDLLRNSYIIPYRFNADGHQNPIIMTDEHGNPLPEYKHISHDKNYIHFHEIYNDMPDKKDIYYAQAYRYSHTYDSEHMTPTQQVIVKHDGILLIRELPDTVKLKETEAEAYSAVWDLMIQIEKELPMAYVFYGQDSLVENDKRYDEIGIFLRSSHFLKNLEKHVQKAEAIIYGRMADNSYTDIMEKNHMEIPWHDYARQDGNILIDKAGLIEKASVIGRVGLIMLSCGTGAWRVRTSMNRLSKVLGVTCTVDVGLMSIEFNCFDGTDCISQSLSIANTGVNTSKLYRMEQFVDNFPNEEAHLTGEEIHRRLDEIEQIHAIYSPARLGLAAAIACCAFTFLLGGGPIEMMLAFIAAGIGNLIRTKLIKHHFTLFLNIAVSISASCFIYAALLKIAEMAFNVPSIHEAGYICSMLFIIPGFPFITSGIDLAKLDLRSGLERLAYAIIIVMVATMFAWIMALLLRLQPMDFEDLNLTPVLHLILRLIMSFFGVFGFSIMFNSPTPMAATAALIGAIANSLRLELVDLTGMPAPAAAFAGALTAGLLASFIKENNGYPRISLTVPSIVIMVPGLYLYRAIYNFGIMALSDAVSWFASAIMIIIALPLGLIFARILTDKTFRYCTMLTAVTGINWGDEGKGRVIDLLAEHADIVVRYQGGNNAGHTVVNKQGKFVLNLLPSGILHPDVVCVLGDGMVIDLNHLSNEIAQIRTQDVSVSPKNLKLSTRATISMPWHKIQDELEEERLSKSGAAFGSTKRGIAYAYSDKYRKKTIRLGDLLHLDEENVQARLKTMLEAKNLELAGCYHQEPMSLSALLSWCRQKAAKYAPYITDTGAFIEDALSKGKRVVLEAQLGAMRDIDYGIFPYTSSSSTISAYGPIGAGIPGASLDHVVGVLKAYSTCVGAGPFVAEKAMNGEWTEMVRKYGGEYGAATGRPRRVGPFDAVASRYGLKCQHADKIALTKLDVLSIMDQIPVITGYQYKNAVTNVFDPTENLEKYTPVVKMLPGWKTDISNCRSYDELPVNAKRYISFLEDMLRHEIQFVSVGAERNQYLLNGKWLMYDSIIIGTGPAGLSAALNLKTYKKDFIWFGSKNLSEKVQKAEKITNYPGFPQISGQELFERFDAHRRAAGIDITEKTVTNIMPAGNGFMVLADNEMYEARTLILCMGVMSAKQLDREDELLGKRLSYCATCDGMFYKDKRIAVICNDKKYEHEVKYLADLAAEVLYFPAYNDSEIELQNVKISKDAPIALIGDSFVEGITLRSGKTESVDGVFCLRNAIAPSKLMPQLEIENGHILVDRAQQTNVAGCFAAGDCTGRPYQYTKAVGEGNVAAHSCIQYLSKSEKMTLQQLKYVVTVAECGNITEAAKQLFVSQPTVTSAIHDLEKEMQIVIFIRTNKGVILSEDGERFLGHARQVLEQVDLIEGIYKDDVVSKPHFAVSCQHYSFAVNAFVDVIREFDAYQYDFTIREEQTHEIIEDVTNLKSELGVIYLSSKNTEVLSKMLKRNELEFTELFTATPHVFICDSHPLASKKSITMDDLQDYPYLTYEQGEYNSQYFSEEFVSTLDSRKNIRVRDRATLFNLIIGLNGYTVCSGVISAELNGRNIISKPLDVEEYMRIGIISRKGVVLSRYAREYIEALKAHCMMKSTAFDMAMVAYRQNDMESAFRQFLSLAEAQDADAMNMAANMFERGQGTYRDPGRAVFWWKKAVELGNVDALADYGQYLVATFFDGKEQKLGAGYLVTATERGNNRAGESLVEFALKNNDAGVKVYRTAAEYCDRAIASATDSYLRTQYVQKKGMLKYKLRQHRIGNNYVYLAAVFSTIGAVLLMIASVDLFLELHMEFRDMFKLFSYSKMIPWEADIAMLFGAMLLFTFGKVTNKLHVASFLQLLASVFAVAVVAMHFICVINDGRVWYDKLLWYVVLVVIPLMLGKLLGEILRKIIGIQMGKLKERFHRKNGIVSRIFSMVLALAMIMTMIPAIGGATTAYAASPTIRLYLDKPSTWNTPVVHVWAAGAAVDNHGAGNATISQWGNQEKPKLAYEESSGLYYVDVQSSEWTGFQFVDAGSKDESAPEIKTEGAAIEQIKTFTSDTSIYCLLDDNGKYQWYKDASKKETLIPESVPTECDLTINYKSTLGDDVAAYIYKETNKPAGEWPGKTMTATAGHEGWYTMHLTLDNSTDYNLILNDDGHGNQLSDVTLSTKGKAEAEYWFDGSLSETKPADWKYVTTIHYLASGMGSTIYNYMWGADASATGAGVGKEWPGGQISANADHLGWYDVVYTQDVKQNFSCIFNNNNGTQTDNIDVSVTSTSTELWVTGTKGDTTVYKTAPDSWEAPVPDHTFTIYYYNEDLSTDTDMGKVDLWMWNAGLDGSYVFDGTYYDAENKVTWFKQTITVAGSNVGKTVGLKARYDNTKGWDGGSDTADRSFTISGDENEVLYYVDGSDPVHEKPVIVPTEKRYLVLDYENPGLKEKGNTPQFYTWSSGYASVLTDFTYVGGDKWTVTIPAKPSCTKVDFCIALDSTGDPWIKDGGDHSVTFPSDQKVIYASMKAGSEPEIAMPYNTGYEVDAENQQVSYYYRDDDAFVDGTLKDMKVSVDVNGTEYPMTYNDITKRFEYVKNGLTNGKTHYRYKANGNYVVDAFNSNSEKYNNADYSYFEYYKLNATVTAEVMNKSFNYNENNVVKFKVKQADTDTQKLEVASASIDVSSLGGSSEMPIEPELQAVTISATVDTTLGTKTLPITVTDQYGNKFSTTVDVEITDRVKKNENDFDWDEAVVYFMMTDRFFDGNESNNTASGTDTYGDNPGLYHGGDFAGVTAKLDYLQDLGVNTIWLTPIVKNIAGVTVTDEGKEDVPYNAAYHGYWASDFTKLNPTMGTTEEFKTMISEAHKRGMRIMVDIVVNHAGYGTESTFADMLRDKSVSEGDIKSWQSGLPDFATEKADVRAKLVEWQTSWMKDYGVDYFRVDTVKHVDSTTWAALKNSTTEVNPSFKMIGEYYGAGYASNGSTLGSGQMDADLDFDFNDQATSFVSGNISSVEKFLSARNSALNNAYMTGQFLSSHDEDGFKASLINGKGYTEDEATSAALVAATLQLTAKGIPVIYYGEEVGLSGLNNYPYQTNRYDMDFSKATKDNVTYQHYKNLLSIRNAYTDVFARGSRTVVAGSDEEGYDVVSRSYGGTTLYVGMNIKDTAKEVKVPVSLAAGTEVKDLYSGATYTVGSDKTVAVTIPAAKDGGTVILTEVKKTKDPGKTDPTPEKVSATLITLDKKTAGKQQNDTKKAAPKSGDDNEAATYVCLLGLAMVAITAATYRKKRACNMEHYYDPADYNKVIYRQRKEDYNQRLQTILLDADCLLQKCNGGYDDVSEYQLLVRAFSFEKNTGKVKASFNKNNVRTFLSKISAAPGFRIKPEIAKKIIHKISNEKLSTISRTLSTKKISHILHKNEMVYKGLINPKTAQKYEDYGIMVGFNYFTKKSPHISVQAPFEIMIVRVPDYFSEFSCIAGDCKDSCCLGWEIDIDEDSYEYYQTLPGEVGERLRKGMYETEDGGHGIRTNNCGRCIMLNDKNLCDLYIAAGEASLSEVCTDFPRFGIEYRNVEQKCLSLACEEVCRIFFSKTKPVKFVEQELFGDSDDDQGVTEEEAAFFEEVQRELIAILQDRTKPIGVRVDEYLDRANEYQKKLSQNDVEKHIDWLSFNDFSFEHFDIRFGIINEMELLRQVWQDFKDDMQTVLTEADYEKRMKEYMTSGDYRENDIEQLLVYFTFRYIMNAIYDSNIMVYAYLSVMFTMIVRDMNATRFYKNGGSFTIEDQMEVARIFSKEVEHSEENVEAAKEEIIWGMKKKCDKLLGILCYALGILAALYVGGWLMLIKPIHVIIIAFGNDMLTLPLLLKSIIKIAFSTTFAGLVWCIGYIGYNFFKGNEDPDWAAIEARFRNKHSDTTNEDLLKEREVMNYAGIKYCDIANGLGCRTVLFVSGCRNHCKGCFQPQTWEFDYGEPFDEQIQNEILDSLKPAYVQGITLLGGDPFEEENQEALVPFMRRVKERYPNKDVWAYTGYLYEELLENGRKHTEYTDELLSMIDVLVDGPFIEEKKDITLKFKGSANQRVIDMEKTRATGEVSILEFTKIMAGFFFALMTFFVRMSGDLPTMQKAFFRNAVAAVAAVILLAKSDEGFKIKKDSWKGLFLRSFFGTTGLICNFYAVDHLAIADANILNKLSPFFAIIMSYFVLKEKANKTEWLCVVTAFIGAVFVVKPSMNVQFFNAMIGVIGGFGAGVAYTFVRKLGKQGERGPVIVMCFSVFSCIVTAPFLLVGAKPMSVYQIVMLLFAGAAATGGQLSITKAYTKAPAKEISVFDYSQVIFAALLGFVFLQQIPDYLSVIGYVIIIGSAIFKWNYNLRYEEKVMGKVYMMITFSILPVIVVYLILSKHIVGGVAMGSVKGMKNTSDKKKDFSVFSYVEFCLWNAMDDMTNFQRNFSTGEVEIHAGGSQLFHKTEYRERRNHYAVYAVNASVDGFDTDRDSFLGAYGENSAPSVVVNDQSKNSVASGWAPVGSHHLKVALEPGEEKTYIFVLGYVENHVNEKWVGRAEYGIINRAPADALLARFDTTEKADAALAELKAYWDKLLGHFTIASSEEKLGRMVNVWHQYQCMVTFNMSRSASYFESGIGRGMGFRDSCQDLLGFVHLIPDRARERILDIAATQFEDGSAYHQYQPLTKKGNADIGSGFNDDPLWLIAAAAAYIKETGDYSILDESTPYDSDPSKATDFMEHLRRSFNYTINHLGPHGLPQIGRADWNDCLNLNCFSEEPGESFQTFGPSEGPNAESVFIAGMFVKYEKDYVKICRHKGLCDEADTAQKAIEQMEKTHLTLVKQRTAGMDGFTAKRKFRGNTYHITVRNPAHVQKGVTKLIVDGAAIDGNMIPAINGTGHDVTVEVTMGMITSIARQSIILKCLRQKSVLVSNYELYYTAGLAKKCFGIAVDADMEPKQLLEELQKHIDKVSTSDEQEKYLIHLLGNYEPDDTHDEQTVELFHMGETEEHMWQVSITMFEYILREIFLSVIAFLAGAGVSAGVFAFVLVIGVVPRILRCSRIENIILIENVMICGVVAGNISSVLDTAYNLGFANMPKVPVSNICGNIIIAIFGLCVGIFVGCIAVALAEILHTFPIIYKRMKLRAGLGIIVISMAIGKAMGALYYFLTGFVATSMPEHTDTPKEKILVYIRAEKQKTLHRRQVCINDIASVYCKYSRYEGQIKGIIVDKIRGKKSVISVMKIIEQITEIYDDAQVISIGEPEVLVEYDDNSKNKILEALKVAAVCILIFFGSAFTIMAFNNDISISGVFEHFYKQIMGVDKPQVSVLEVFYCIGLAVGIILFFNHIGKRKLSDDVTPIQVEMDKHNKDTWNTIIDKVKEKQDVMAYTKEILTLAVEIGDCMLRNGAEIYRVEDTVVHILSSYEVEEFDVYVLSNGIFASANENKEDACSIVRHVPLGAVNLAKISALNQLARDICDQKISLIDSWDRLEQCKNIPNYKKSAQIFFCGLGSACFCYLFGGSWLDFVFAFVIGSLEQVLLFGLKKYKFTRIITNILASLFVTLLATASTLTGLSLLPDKIIIGAIMPLVPGIAFTTSIRDIYNGDYLSGTIHLLDALITAVCVAVGACLPFVVMKYIGGLMEFIIQFIVALFATLSFAVIFSAPKKELFYCGFTGALGWIIYYIMVQFDMGVVFPSLIATLCLTIMARIFAAARSMPVTVYLLSGIFPLVPGAGIFYTAYYLFTNDRALSSSKGIETFEVAGAIVLGIIFGFGIPQSLFNLLKPKKKMRGRRKYEKMNIINVENITKSYTGRKLFSKASFYVQENEKIGIIGINGTGKSTLLKIVAGDEEPDEGTVTTANHIVINYLPQNPEFDPDETALEHVMGRVVTSQLDEDMRWSIESDAKSLLMKLDITDMAQKTGELSGGQRKRLALATVVLKPCDVLILDEPTNHLDYEMVEWLEDYLRRFRGAIIMITHDRYFLDSVCNRIVEVDKGQTYSYDTNYSGFLELKAAREESERASERKRQSILRKEIEWMQRGARARSTKQKAHIQRYEALRDQKGPQTDARVELSSVSSRMGRTTIELHDISKAYGDIVCVKDFTYIFLKNDRIGFVGKNGCGKSTLMKMIAGFIEPDSGEVEIGQTIKIGYFGQEVDIDPELRVIDYVKEAAEFVRTADGLVSASAMLERFLFPPEQQYSPVGKLSGGEKRRLYLLRVLMSAPNVLILDEPTNDLDVETLAILEDYLDGYDGIVITVSHDRYFLDRIAKRIFAFEGAGKIVQYEGGYTDYMNKRPQPASGKTVSENASSTGASASGAQGNTASDGTDSKEARKKKSMETWGHEKKLKFTYKEQKEYETIEADIEKLENRLSEIDDDMVKNATNFGKLNELTKEKEDLEGQLMEKMERWEYLEDLAQKIANLTMEQEFAEGIDSWETMMFLYNSALKEVNTKLEILNDEFVHIHNYNPIEYIKSRIKTPESIVKKLKKGGYESTIENMVTYVKDIAGIRIVCSFTSDIYRLAEMIGRQNDLTVISVKDYMKHPKASGYKSYHMIVSVPIFLSNKVEDTKVEIQIRTIAMDFWASLEHKIYYKFEGNAPEYISRDLRECAGIVGQLDAKMLSLNEAILEAKEKQEHEREEKIREDEHHMRIWFKIYTDTHLMRDITIENDSDDTRTHKIFKALEDACLAFDLGKPIWLDSNVSDFKRHGKTRFTKDNFVENIDFDFLEMHIIEEDMITSASNKSIKNVQALLSKAKERKKQGVFVVEGPKMSFEAPYDWVSAVYMSESFFYDDRFKEEKKRFLDKTEIVSDSVFKSMSDTQTPQGVLAIVKMPHYEIDELFKGDKTELLVLESIQDPGNLGTMIRTGEGAGVSGIIMNRTTVDIFNPKTVRSTMGSLYRVPFYITDDLPETIEYAKSKGVSLYAAHLKGKCSYDRPDYTGACGFMIGNEGNGLSDEIADMADIYIRIPMEGAVESLNAAISATLLMYECNRQRRLLGEMAKEINTIGVLTSGGDAPGMNAAIRAVVRQALSKGKKVKGIKRGYAGLLNEEIVDMDSKSVSDTISRGGTILQTARCKEFVTAEGQQKGAEICKKHGIDAIVVIGGDGSFQGAQKLAALGINTIGLPGTIDLDIACTDYTIGFDTACNTAMEAIDKVRDTSTSHERCSIIEVMGRGAGYIALWCGLANGAEEVLLPEKYDNNLEALIERVAHARELGKQHYIIINAEGVGHSQEMAKEIEAATGIETRATILGHMQRGGSPSCKDRVYATIMGAMAVDLLCEGKSNRVIAHKDGNFVDFDIDEALAMKKSVDEYMYDISKSLVMSFCHLHTHTEYSLLDGSNKIKEYVKRVKELGMNSAAITDHGNMYGVVEFYKTAKANDINPVIGCEVYVAPNSRFDRETSHGDDRYYHLILLAENNTGYANLMKIVSIGFTEGYYYRPRVDFETLERYHEGLICLSACLAGEIPRYIVRGFYDEAKEIARKYQDCFGKDNFFLELQDHGIDDQKLVNQQLLRMSKELEIGLVCTNDVHYTYESDAEAHDVLLCIQTGKKVSDEDRMRYDGGQFFVKSEEQMRALFPYATEAIENTQKIADRCNVTLEFGNYKIPKYEVPEGYDSAEAFLTELCEKGFREKYIGCGEYSAKELKKIHADMDYELGIIKTMGFIEYILIVWDYINWCRTHDCWVGPGRGSAAGSRVCYCTGITDIDPVKYNLLFERFLNPERVSMPDIDVDFEYAERYRAIEYVQQKYGHDSVTQIVTFGTMAARGVIKSVGKALDFPYAETDRLAKMVPQELNITIDKALQMNPEFKGIYDSDARVHEMIDMAKRLEGLPNHTSVHAAGVVIYPGVASDYVPLGRANDGSPTAEYNMVQLEELGLLKMDFLGLRTLTVLKDSVKNIKASRGIDVDIDHIDFNDKGTLDFIGTGKTEGVFQLESAGMQSFMKELSPQSFEDIVAGISLYRPGPMDFIPNYIKGKNNPKEISYVTPELESILEPTYGCIVYQEQVMQIVQKLAGYTMGQADNIRRAMSKKKQYVIDAERQSFVYGDEERGIKGCVANGIDEKAANSIYDSMVDFAKYAFNKSHAAAYAKISVQTAWLKNYYPVEFMAALMTSVIDNSAKAAQYLYSCRDMGIKVLPPDINCGQGEFTAEGDHVRYGMYAIKSLGRPVIDQIIEERESGGRYRTLSDFIERTCQKELINKRAIENLIKAGACDSLDGTRKQMAMVYASIVDRVQHDKKSTMAGQMSLFDLVSDEDRQSFELKYPNVGEYDAEEALAYEKEVLGIYLSGHPLEKYAAALKKNITANAIDFVLEEESGAVKIKDNAHVVIGGMIATKTIKFTKYNQAMAFITIEDLTGTVEVIIFPRDYERYQRYLQDDAKIFVIGHATVEDEQNGKIICERIIPFDELPKQLWLRFDTMEDYKKNESRLLETIRESDGGDEVIIYIADTKQMKKLGRNYSVNANNELMEQLLEFLDKENAKIVEKNIEKMCMEKVIAKSGISGSTLKLIAIFTMLIDHTAATVILQMINNGIGGQTLIDIYWVMRSIGRMAFPVFCFLLVEGFKYTHSREKYAARMFIFALISEIPFDLAINNTVLEFKSNNVFFTLLLGLLAITVLDWLKSVDKIEKASSAVKWFFVTLIRCIVMVSVVLVMMIIAEFVLCCDYGAAGVGCIVMMYLLSSNRDVAFAVAVILLGLFSGTIEFFALFMLIPLRYYNGKRGISLKYVFYAFYPVHLFVLYLICRLAMAAAVHTMRDNTFSKKVFIKTVSDNLKNKYRKTINDATQQELYQAVSEAVKDVIMDEWIATQRVMDKDDPKVVYYMSMEFLMGRALGNNLINLSAYKEVKEALTEIGVDINAIEDQEPDPALGNGGLGRLAACFMDSLATLGYPAYGCGIRYRYGMFKQQISDGFQIEVPDNWLKDGYPFELRRPEYCYEVKFGGYVQESTDENGELHFEQKDYQSVLAVPYDMPIVGYDNNVVNSLMIWDAEPKNGFSLESFDQGDYDKAVEQENLARNLVEVLYPNDNHVKGKELRLKQQYFFVSASIQRALARFKKHHSDLKDLPNKAVFQMNDTHPTVAVAELMRILVDEEHLSWDDAWDITTRCVAYTNHTIMAEALEKWPIEIFQRLLPRVYQIVDEINRRFVIQINERYPGNEDKVRKMAILYDGQVKMANMAIVAGYSVNGVAKLHTEILKNQELHDFYEMFPEKFNNKTNGITQRRFLAHANPLLADWATKKVGTGWITDLTKLSKLNAYADSPVAQQEFAEIKRANKVRLAKYIKEHNGIDVNPDSIFDVQVKRLHEYKRQLMNILHVMYLYNKIKENPSMDFYPRTFIFGAKAAAGYRNAKKTIKLINSVADVINNDASIGGKLKVVFIEDYKVSNAEIIFAAADVSEQISTASKEASGTGNMKFMLNGALTIGTMDGANVEMFDEVGADNMFIFGMSSDEVISHENRHDYNPVDIYNNDAELRKVVNQLVDGTYSPNDHELFRELYNSLLNPQQGQVADRYFILADFRSYANAQQKINDYYKNKSAWRKSALLNIAHVGKFSSDRTIQEYVDDIWHLDRITVNMAGVMYNKVDTNMNFVEREKKTEQFWRENNIFRKSMENRKEGETYTFYDGPPTANGKPHIGHVETRTIKDMIPRFQTMKGKYVPRKAGWDTHGLPVEIEVEKLLGLDGKDQIENYGLEPFIKKCKESVWKYKGMWEDFSNTVGFWADMDNPYVTYDDNFIESEWWALKEIWNKGLLYKGFKIVPYCPRCGTPLSAQEVAQGYKTVKEKSAVVRFKVVGEDAYFLAWTTTPWTLPSNVALCVNPNDTYVKVKAVDGYTYYMAEALADKVLSQLLSKEDAEAGKKAYEVLETYKGKDLEYKEYEPLYDCAKQVADKQGKKGFFVTCDTYVTMSDGTGIVHIAPAFGEDDANVGRNYDLPFVQFVNDKGELTAETPFAGMWVKDADPEVLKDLSGRKQLFDAPKFEHEYPHCWRCDKPLIYYARESWYIKETAVKDDLIRNNNTVNWIPESIGSGRFGNWLENIQDWAISRNRYWGTPLNIWECECGHRECIGSRAELAEKAGDPKAAEVELHRPYIDAVTIKCPECGKDMHRVPEVLDCWFDSGAMPFAQHHYPFENKEVFEKQFPAKFISEAVDQTRGWFHSLMAESTLLFNKAPYENVIVLGHVQDENGQKMSKSKGNAVDPFDALETYGADAIRWYFYTASAPWIPKKFSGKLVLEGQRKFMGTLWNTYAFFVLYANIDNFDATKYSLEYDKLAVMDKWILSKLNSAVAGVDECLSNYKIPEAAKYLQEFVDDLSNWYVRRSRERFWAKGMEQDKINAYMTLYTALVTISKAAAPMIPFMTEDIYRNLVCSIDKSAPESIHLCDYPVVDEKLIDKKLEADMDEVLKVVVLGRACRNEANIKNRQPIGKMFVKAPEKLDEFYVDIIADELNVKEVEFTDDVSHYTTYKFKPQLRTVGPKYGKYLGQIKAVLAELDGHKAMEELNSTGSLKLDSISDEVVLSKEDLLIEMTQMEGYVTQSDNNITVVLDTNLTPELIEEGFVREIISKIQTMRKDAGFEVMDHIAVTYEADEKLSNVFEKFGDEIKTEVLAVSIKSGELKGYEKDWKINGEAVKLAVEKQMHQGTYNQNPNAQGTYNQNPNAQGTYNQNTYAQGSFNQSAYGQTQYGQQPNGQGGYNQTAYGQTAYNQSPYGANPYNQPPKNSNGFGIASLVLGIASIVLFCTCINYVTALLAIIFGIIHIIKGNNKVFGIVGIATAVISVIVSIIFWVVAGSNVSTDLEKEFMRGFDNGYEYYNDDDSYEDYDYDYDSFDHDDYDYQNFEYDGIYMRLLSVFPIKVPALVAITLMIAESRPEKKDIMVNLVMNFLTMMEEVINGILIREVETKNIMTKSSLPVGGYSVNPYVGCTHACKYCYASFMKRFTGHKEEWGTFLDVKHWPEIKNPKKYAGQRVVIGSVTDGYNPQEEQFGNTRKLLEQLIGSDADILICTKSDLVVRDIDLLKKLGRVTVSWSINTLDENFKNDMDSASSIEHRISAMKQVYEAGIRTVCFVSPVFPGITDFEAIFERVKDQCDLFWLENLNLRGGFKKTIMDYIAGKYPDLVPLYDEIYNKHNRSYFEALEVKAEKMAKKYDCAFVDNEMPYGRVPQGHPVIVDYFYHEEIRGTENTGKRNRMSICIKEQIQNMNIVIGCTVGCAYCYARNNVKRWHMIDDFAAPEFFPGKLKMMEKKRPQNFLLTGMSDLSGWKPEWRDEVFAKIRENPQHQFLFLTKRPDLLDFDTDLENAWFGITVTRKAELWRIDAIRKNVRAKHYHVTFEPLFDDPGTVDLSGINWIVVGTMTGAQSRKIHTEPEWAWSLADQAHKLGIPVFMKEDIVPIIGDENMIQEMPEEFNKVLEVQKSWKKMEMNGGFLVTKIKQLGDRIFEKILSEKNIDAFNGAQGRILYVLWQEDGISIRSLSTKCGLAITSLTTMLERMENQGLISRVQSETDKRKTLLFLTEKAHALKGEYDSVSDEMGSIYYKGFSEEEITQFEECLDRIRKNLEEWQKSMKKVCLAVLPALTIVLELLPFGAVCIFATSPTERVKETFSYFSLTPFGYANFAPLITATLTVAIFLLSLFSLKKKGVLKALFVLSIITVVISLLPLMYGLNYYTLVGAFITVTLVIESILAKIQQKMSNEITIQDVFHQFLPEYSETHLFSTEQHMAALCISKCRTAEMGANISECESCHKKYIHYNSCKNRHCPMCQGMEVDEWIDKQQENVLDVPYFHTVFTIPEELYSLVYSNQKLLYDALYHAAHLTMTELSSDPKHLGAKIGYICVLHTWGSRMNYHPHLHTIVLGGGLDSTNRWKDKGKKFFFPVKVMSAVFKKHYLKELKLLHESGKLQYLGTSQKLKNHYTFKELLNTLYAKEWVVYTKEAFNGANSVIKYLGRYTHRIAISNRRIISMTSETVTYLAKDYKNGGKMIPYTVKGTEFLRLFLMHVLPKGFVRIRHYGILSCRSKKDKMDLCRKLLNCTQYLSKLRNKTVAEKLQILYQKDICKCEKCGGKLLSFRLRGSYSLTGMYEKYFKQLKEECLIRNRSSRTAEAYISNIASFMKWTGNKPMEELCLQDAREFILFKRKSGVSATTCNFYNSSIAFLYKHVLHIPWDQDVVPRMRIDARLPEVLSLNEVETLIDTASHIRNKAIIALLYSSGLRVGELVKLRAEDIYMSRMQVYVPKSKNHRDRWTILSNRALELLKQYWRSYPVKRDYLFVSLDEPHEPLKVSGVEIMLRAVGKDAGLSVHPHTLRHSFASHMIEQGVPINYVQSMLGHRCLESTQVYIHISNQTVMGIKSPLDHPQKKKRGRKPKKKDGDSNEMIGLIVARSKNNVIGKNGNIPWKIKGEQKQFRELTTGNVVIMGRKSYEEIGHPLPNRMNIVVSTTTEYQGDNLVSVKSLEDALLLAKGRDVYISGGYGLFKEALQIVDKMYITEVDLNIEDGDTFFPEFDINDFEVLIGETLGEEVKYTRTFYVRKNELSRFWIMDKPTVQDIFHRFYPAYLDQYSPSPVQAKVAHNIMNCKTGAYGANVCVCEDCGFVQIHYNSCRNRCCPMCQAVPKEMWMDARREDVLDAPYFHLVFTVPDILNPVIYSNQRLLYDALYHAASSTISELTADPKHLGAKVGYICILHTWGSEMNFHPHIHTILLGGGLASNNQWKDNGENFFLPIRVISKMFRGKYLEELKRLWEEDKLVFHGTAEKFRNHYTFKELLDSCYGMDWIPHCKKTFNGAQTVIKYLGKYTHRIAVSNHRIVRMDDDTVTFLVKDYRNEGQWKELTISGVEFVRRFLMHVPPRRFVRIRHYGLLCSRTKSQKLTLCRNLLGCKKYLSKLRDMEMPEILEHLYGIKVCVCKACGGHLGKPQMRMPLRCMYEKYLLQLEEAGKIRNLKERSINCYKNYVSYFLNYMEKHPEELTCQDVRDFLLAKKDDGLKATTLNLYNSAIRFFYRNVLHVLWDDITVPRMIIEHKLPTVLSTDEIDRLLDATDDLKYKAMFATMYSSGMRVSEVIHLHYDDISRTNMQIHVRDTKNRMDRYTILSERNLALLTEYWFRKGRPKGILFPNQFTGQYLTVSTLEQVIRRSASAAGLSGVTPHCLRHSFATHLMEQGVEQRNIQALLGHRDPKSTEVYLHVSNKSIMGIRSPFDRKDGTANGSFIKTDNVYHKYYDDVLILLKTGLRISELCGLTVADIDFKNEVVIIDHQLLKSKEQGYYIETPKTKSGTRQVPLSKETIQAFQRVMKKRELEQQIRRDIEDGIDSTGKKMTLCQLYAKQNAQRANVKKSTQKQREQLMRLLKEDKLGARSIDTIKLSDAKEWALRMKDKGFSYNTINNYKRSLKASFYIAIQDDCVRKNPFDFKLSEVLENDTKEKVALTEEQEQALLSFIKTDNVYHKYYDDVLILLKTGLRIGKYLYKYVDAFGNTKYVYAWRLTPTDPTPKGKRDKPSLRELEQQIRRDIEDGIDSTGKKMTMKEKRRDSKGRILHTGESQRTDGKYLYKYVDAFGNTKYVYAWRLTPTDPTDEPNLELKCKVYNINDGKNKAIMESCGWLNDYMTFVNKVREYHADGAFDDLAIDIEKAIDYCIDNDILKEFLKTYRSEVTKSMQLNYEFDRQLELERADAIEEGLEQGIKQGLEQGLEQGLEQGLAQGIELINQLNQILLSEGKYDELQKASKDKEYQKKLLAEYGLLNEKQGEMRQKELEKWLKIVIIAVALCGLVVCAVAIPWIGHVLIASDPQISDMYIPWLVLFIISAIPCYVILYLGWRVAVNIGKDRSFSLENARHIKLASKIILFDALYFFVVNVCMWRIYVNHPGVILALVFIVFACVVASVVAAVLSHLVVKAADLQEQSDLTIMEGEIIFNIDVMLAKRKMSVTELSQRVGITMANISILKNGKAKAIKVSTLAKLCEALDCQPGDLLEYRNCSCDNGENIVSMNNYDVIIIGAGPGGIFGAYELIEKNPDCKIAVFEAGHELAKRKCPIDGKKIKNCISCKSCSIMSGFGGAGAFSDGKYNITNDFGGTLYEHIGKQPAIDLMEYVDEINMKYGGEGTKLYSTAGTKLKKVCMQNKLKLLDASVRHLGTDINYVVLENMYAHLKDKVDFYFDTPVESVEVLYDENTAGADACSLQEAHTDNVSGYAVKTADSTYESRYCIISVGRSGSKWMEKVCNDLDIPTKSNRVDIGVRVELPALIFSHLTDELYESKIVYRTQLFEDNVRTFCMNPHGIVVNENTNGIVTVNGHSYEGADKQTENTNFALLVAKHFSEPFKDSNGYGESIARLSNMLGGGVIVQRFGDLVRGRRSNEKRIEEGLVTPTLSATPGDLSLVLPKRILDGIIEMIYALDKIAPGTANDDTLLYGVEVKFYNMEVELNDRLESKYKGLYIIGDGSGVTHSLSHASASGVYVAREIEAERMNYLEIEKVVGREILDSRGNPTVEAEVYLVDGTVARGTAPSGASTGEFEALELRDGDKSRYLGKGVTGAVENINTVINDTLTGMDASDIYAIDVAMIEADGTKDKSKLGANAILAVSIACARAAAVSLDIPLYRFLGGISGNRLPVPMMNIVNGGCHALSSGLDVQEFMIMPVGAPSFKECLRWCAEVFHALAAILKERGLATSVGDEGGFAPALKSDEEAIETILEAVKKAGYEPGKDFKIAMDAASSEWKSEKGKGFYKLPKAGTEYTSEALIEHWAKLCDKYPIISIEDGLDEEDWEGWQKLTARLGDRVQLVGDDLFVTNTERLAKGISLGAGNAILIKLNQIGSVSETLEAIKMAHKAGYTAISSHRSGETADTTIADLAVALNTCQIKTGAPSRSERVAKYNQLLRIEEELGKSAVYPGIKAFNVQQMDNNNIGGMNPQQFSQNTPQTSQPHMGMSGIELQNMQQEAEQRRREKSRRNADFFGRLCIPTIIYALLYTIFLYENTGGILVTLFAIVTGVYSLYCMQILHIEAKPLTIWYSVMMILTGLSSGLTGNKIIQGFNFCWILVFLVFMLLHNFCNDRQWGLIKYIVAAFQAVFGAIGCIAEPFMDIADYMRNERMDSDNMGSDSMVGDSANATAGERHVKKHRMLYVFIGIAIAFPLVVLIVVLLCSADAVFASVIKKIFADINFFTVSKVVFLFVFALFSSYCGIKYLSKKRISDTPVETPAFPAAIGITVAATISVVYVFFCFIQIVYLFGGLMQLPSGYTYARYAREGFFQLLFVCILNVIIVLLGSGLFRKNKILNAFLILITLCTYIMIASSAYRMGLYVSEYGLTATRLCVFWALGVIALFMLGVILSICKPAFSLFRYGIIVIGVCYLVLAFARPDYLVARYNTVCMEDTDYKYLMSLSTDASPALAADADFMENKGMVNMYARQLAGETNDSLRQLNVSHIKAAHLFRDSIDEVKSSQLILLYVYSPCDSGSYNNNDTGLDGVDSIQMGYHVLKDTEDDDTAYYDYDSYSMDDTRVAAPVLFKWVDAVEVKKISDSERIFLAKIPRKALKGKEGVNIEYRFNKNGDVIYSSQYNVILDKKKGLNEVEMSYYAGTDGVDVPEYNIYGKMNKWSRFKFTPNLPLGANGERVTGSKAHIELSKEAAKEGMVLLKNENNVLPLAAGSKVALFGKGTFDYVKGGGGSGDVTVAYIRNLYEGLKLQKEKISIFEELCDYYRNDIKKQYAAGAVPGMTIEPDVPAELLSKAQAYTDTAIISICRYSGEGWDRKSVIDPNNKALWDYEREMTEKSAELFKDGDFCLSVKEKEMIDTVKASFKNVIVILNVGGMVDTSWFAYDDQIQSALLALQGGIEGGLAAAELLVGDGNPSGKTVDTFAKSLDDYPSTYNFHESRNYVDYTEDIYVGYRYFETIPGAAEKVVYPFGYGLSYTSFDVETVSAGVVNSNCTSETNKLYAKVRVTNTGKFSGKEVVQVYIAKPQGKLGKPAKELAAFEKTRELQPGESQLMILTWEINDMASYDDLGKVKKSAYVLEAGSYDIYVGTSVRDVTKADYSYILNHDVITEQLSAKLVPTSLPKRMLADGSYEALPQSEPVDTDYSAIGNIDPSLTEGVAPGQRAIPYFRFADGMAKNGSHDIMDVVEGRITLDEFVSELSIDDLIHLLGGQPNTGVANTFGIGNMPEYGIPSVMTADGPAGVRIAPEVGICTTAFPCSTLLACTWNPDVLEAVGRAGGEELKENNLALWLTPAICIHRSPLCGRNFEYYSEDPFVTGKLAGAMVRGIQSNNVGATLKHFALNNKETNRKNSDSRVSERAAREIYLKAFEMIVKNDNPWAIMSSYNMINGYRASESEDLLTGILRDEWGYEGMVTTDWWTCGEHYKETKAGNDLKMGNGYPDRVKKAYDKGAISRSEMETSVKRILGLILKLDMQQYTHENVRSIPHLPIYCDRYEDYRQFSPRHWHDHIEIIYVVSGSLQVVCGENEYTLQENEFFVINSNKIHGTQSYERVRVLLVQIPYAYLDSYIDDYGHIRFRECYETEHGSRKYEQMKSLLKSIAHIYRKKGKGYELRLMAKVNEFLYILFTNYSYKEMNAGKESRQIARLKDVLRYVAKNYQEPIALKEAADIASLNQDYFCRMFKKCMGVTFLEYVNQVRINHIHEELLATEDSITDILEHNGFTNYKVFSRMFKAQFGMTPRELRKLQENMNKRVLSAMPSQTFAEGALDAAQQTGKLSYDGYKKVWSDEFNGDSLNRADWNVEIHEKGWVNNELQEYVDSAENIQVKDGKLIINPVKKVTDGDTGSTKEAASYTSGRVSTQNKQTFIYGRFECRAKVPKGQGYLPAFWLMANDENVYGQWPRCGEIDCMEVMGQETNKAYGTLHYGNPHSQSQGTYTITDGADFSDDFHIYTCDWEPGKITWYVDGVKYHEESEWHSTTVGQGTLAYPAPFDQPFYIILNLAVGGSWVGNPNDETSFENNPYVIDYVRVYQKDSYDEDVKRPGEISLVMSMKYGYFDESKKEYVITRPDTPAPWVNYLGSPEYGAIVSNNAGGYSFAKSGANGRLLRYVFNQFDEPGRYIYIRDNESKDYWSASWQPVGKDLNEYKSECHHGTAYTKMMADYSGIHSEVRYYVPLNKTYEVWNLSVTNNSDKARSLNITGYAEFTNNSNYEQDQVNLQYSQYITKTVFVENRVRQMIHANLDRIENGKEIDNKDVVNRFIGLAGAPVDSWCGDRGEFLGEYHRYGNPVGVESGKLNNHGNYNENSCGAITTVLELAPGETKTIAFLVGMIDNETAGKIVASYTDTKAVCDKELEELIAYWHGKLSHFQINTPSDEFNTMINTWNAYNCFMTFIWSRAASFTYCGLRNGYGYRDTVQDIQGVIHLAPEMAVEKIRFMLSAQVDNGGGLPLVKFTHNPGHEDTPDDASYVQETGHPAYRADDALWLFPTVYKYVSETGNVAFIDEVIPFANKDEGTVYEHLKRAIDFSMNHLGKHGMPAGLYADWNDCLRLGADGESTFVALQFYYAMTILKEFAAYKKDDEYIAYLDESQEKLGKIIQELCWNEDRFIRGFTGDGQVIGKRDDLEANMWLNPQSWAVISGFASDEQADKALEMVYERLNTEYGAILMDPPYHAHAFDGALAVIYNAGTKENAGIFSQSQGWIILAEALKGHGDRAFKYFIENAPAAQNDRAEIRRLEPYCYGQFTEGKASPNFGRSHVHWLTGTASTVMVGCVEGILGMRPDFYGLHIAPSIPKAWDGFEIEKDFRGCHLHIVVKNPDHVESGCKSLLVNGQAVEGDYIPKELLSEQTEIELTMMKDIDFIDKYGTFRIENPENYSGLYLPLAGEKGLKSSITPTLGGDSKTSQNTFLLEPVSIENLHNNKGTRNFWCRIVGKGFWSVCGSSAQQEADRFTGNQDESELEAGLMWQKLHRASKIYGLEADTTSFVTLDGSMEVMLVEITNKTDEAMEIVPIGAIPIYGRSADNIRDHRHVTSLLHRIETTQYGIEVTPVLSFDERGHRKNDISYFVYGSSGNGESPESFYPTVEQFIGEGGSFLIPEAVRTEKAGAKAGEKFQGKEAVGAIKFVNRIIKPLETVSYIMLAGLTEKENDINAITGRYRSVLEVKEELNTVKKHWIDKVNIDFETGNAKEDNYLKWICFQPILRRIYGCSFLPHHDYGKGGRGWRDLWQDCLALLLMEPSDVRSMIVNNYGGVRIDGTNATIIGNEPGEFIADRNNITRVWMDHAFWPFVTTKLYIDQTGDTDVLFERTTYFKDYQSMRGTSHDEEWNTTYGNKQRTAGGQIYFGTVLEHILIQNLCAFYDVGEHNEMRLHGADWNDALDMAWDKGESVAFTCAYAGNLLDIAKCLRNVEKISGINRIEVLDELKLLLADDEILYNCPDKKQDLLMSYAKACENCTSGGTVLVPIAAICENLEHKAEWMMKNIRENEWISDGTDGGWFNGYYDNNGRPVERCESGDVRMMLTGQVFAIMSGTAKKEQIKAICNSADKYLFDQKAGGYRLNTDFKEEKFDLGRMFGFAYGEKENGAVFSHMAVMYANALYKQGFIKEGYKVLKTLLDTAMDFDRSRMYPGVPEYFDNDGRGLYSYLTGAASWYMLTMITSVYGVHGELGDLVIEPALMPQQYNEKGDAKVSLEFAGHGFDILVHNPDKLEPGDAQVKRALCDDVKVENVTGNSVRIPRHAIEMLSTDKCHTVEIYIEMALSKEWYDAEFVDSESESLHRAPSIEYSFYNAVKTGDMEYVIKNCKEDAFIHLEGTGVLSRNSLQNIKYHFVVTTAMITRYCIDGGLEPEQAYRLSDFYILKMDSCSTVRQVADLHHEMAKDFTGKMVLQKKSSILSKPVTQCVDYIYSNIKERITIADLAAYTGLSESYLSRVFKQNLGVSISDYIREKKIEKATHLLKYSDKPIIDIANYLSFSSQSHFIQIFESFTGLTPKKYRDRYYKSMWMKQKVISTMLLLSMGATLLAGCGTTAGNGKEGVAGDSNAEEGKVINIYSWNDEFRTRVEAVYPEVKETSKDGTITYLKDGTEIHWIVNPNQDGVYQQKLDEAISKQADAAADDKIDMFLSETDYVFKYTDKDADVAMPLKDLGIDCDKEFADQFDFTRKTASDSDGVQRGSTWQCCPGLLVYRRDIAKDVFGTDDPEAIGEKTKDWDTLKATAAELKAKGYYTLSSYADTFRLYGNSIDDSWVQPGADEVVVDKNITNWVDDSKEWLDAGYVDANVKGQFNDDWNKAMGSQSKVFAFLFPAWGIDFTLAPNWDGAAGSWAVTTPPQNYNWGGSYIHAATGTDNPKHVKDIILALTANKDNLLKISKDYSDFTNTKSGMQEAAKDDSFASDFLGGQNPFAYFEPVAENIKIAPLSAYDQGCVELIQNAFSDYLQGKVDYDKAKKNFETAIEERYPDIKKVTWPKMKKKRKSVSYAKWGYIFILPFFITYLIFSLIPLVDTVRFSFFEYYRSGIKEIGPNFVGWANYAELLKSDMITYGKNTLILWVIGFIPQIVVALVLANWFTDARLKIHKLQFFKVVIYLPNLIMASAFALLFFTLFSTSGPVNSVLQSMGVISKPIDFMGSVFGTRSLIGFMNFLMWFGNTTIMLMAAVMGISTEVFEAADLDGCNALQRFFYITLPSIRPILAYTLITSIIGGLQMFDVPQILTNGQGNPDRTSMTLIMFLNNHLKSKNYGMAGTLSVYLFIVSAILCFIVYRMTNDSDPDGSKAAAKRAAKEARRKKKEAAKMKPKHKINVRSIIAHIVLILLSFLCLFFFVILIINATRSHAQLQKGFSFIPGGHFLDNLKSVANDGTFPMFRGIVNSLIISGSCAVLCTYFSSLTAYGLYAYDFKLKKVAFTFIMAILVMPTQVTAMGFLRLITKMGMYDSWAPLIIPSIASPAVFYFMYSYLQSSLPLSLVEAARIDGSNEFRTFNHIVLPIMKPAIAVQAIFTFVGSWNNYFTPALIIQSKNKMTVPILIATLRGADYMNFDMGKIYMMITVAIVPIIVVYLLLSKYIIAGVTLGGVKEMLCRSSVFSILKYEVQHIFYLGNIVAPMQYISRKMQKITKMNPASIMKMMKAKNTFTANHPKFVSFLQYAFGSGIPADSVIEITVTKPGQEPVTSNIKVQQSDLELLESLKDLKMLYQIKDGTVSAGGQTILSHIDFYIKEKEKIAVVGKNGAGKTTLLRLLAGELTPDRDDSRGSYGRSNDMVTGAATAGSDLDGTAKRTQRAKKKKPSGNPETGITMSRNITIDMLRQADKSNQDLTIEQILLESCPDKDTFSKERFDYEMEYDRLFTGFGFEKSDKTRLFRSFSGGEQTKISLIKLLLKKPDLLLLDEPTNHLDMKTVEWLEDYLINYPKAVVMVSHDRAFLDAVATGVYELENRALHRYAGNYTQYRQQKLKNLQIQRKAYERQQAEIAHNNELIEKFKHKPKKAAFARSRKTMLARMKLIEKPVEDEAHIFTGNIEPQFPGGKWVYEAKELKIGYDGRALLELSLRIRRGQKIAVIGDNGIGKSTFLKTVAGLIPPIKGTSQLGSNLLVGYFDQQSALIDSDKTVRDHFHELFPALVEKDLRKTLGMYLFGGANASKRISSLSGGEKSRLVLAELLTGRPNLMILDEPTNHMDIPAKETLESAFKAYTGTMLFVSHDRYFIKQVADAILVFENDKVMYYPFGYDHYISRLKVSQDGNLPALMQAKDAAMVEALAAVPKRERHETRQLSTDEAYLEWKLTLAAEPMMKAADEAEKVYDKLCEAESALNEENVDKLRLQYEKVADSWTKECTKWYDIYLDEMYPESDFMWLSRYFVYFIIFSCMGWIYESIYCTIRAKKWENRGFLYGPLCPIYGAGGVAITAIADFISAHTDATFTWWQIFLVAFFGSIVLEYGTSWALEKLFHAYWWDYSSMPLNINGRVCFPYSVGFGVAGLIVVYFIAPFTKLITGWMSPIWYEFFSLFLMGLLAVDTAITVSALTDFSRTIVNLQNNFNTYMDEVVEEVKERKKAADERAEERSQELAEAVEERRKRKRIRASADRVIDSMGALKKSALNRAQGFRNPKVENRYLDTFTESLKERFKRERIRKAKKAKKADKMHRNNYKSPFLHCIKCRCSALFTLFLLVTVLVLSSSSNVYATETATNYNLSGTNKSTGYEYILDDSANFIDDAVNGRLISQMKKTTEYCNIAVVTTTSHPYGSTESYAVNTFEGYFGNGANGVIFVIDRDLDEIYLACEGSTQRTIPNSKCNSICDNTYIYATSSHDYDYFTCCTETIDQVNTVLAGGHISQPLRYISSIFIALAAGMIFCFVYALSLSKGRKAKSNELMGAAFTKVEIHNARARFMNQTRNYSPQSSGSSGGHSGGGGHSGGSHSGGGHHIMFACKNCGGNVKFDIKSGQLACEYCHSLFDPYAYEDKTSDAEVQKDFEATIFTCPQCGGEILSTDDTAAGFCSFCGASTVLYSRMQKEHKPAYIIPFAKSKDDCKQAYMSLMKKAIFAPKELKDPKFIDGFRGIYMPYWTYYVTQKAPISLPAKRSHRSGDYIITDHFRLEGDLDAYYKGLSYDASSSFDDSISEKLAPYDVKNMKRFTPAFLSGFYADTADLPSTVYASDAMDAACTNTISEISKEPAFTGLSVDSDSAALSPSSLGTTVKETDYSMFPVWFLSYRNKDRVAYATVNGQTGKVVADLPISVGKFLLGSLIAAIPVYILLCLLTVLTPGMTLTIVGVLAIIANICYSQELTMIAVKEAGTEDKGRIAKEQPEALGAISNRRRLKAAKKATKTIKKKTNTSFVAYFILFIFVIQFVPALFAIIAGIGGSFGNADGSLILFVILTIISFIFSIRAFSSFDRMPGHKGVAGLIFGMVSMLIGDAVLLFQPVLDAWYYGAAFIIIASVLITLINVIRAFNVLTTRKLPQFATHKGGDDRAMNTSVIRYLLGYILKLEGFLLLLPCIVAGIYYEKSGIYFLIVALISIAIGFLFSAKKPRNFTFYLKEGCTTTALGWVVLSIFGCLPFYISGEIPSFTDALFETISGFTTTGASILPEVESLSYCMNFWRCFTHWIGGMGVLVFLLAIIPLSGGSNINLMRAESPGPSVGKLVPKMRHTARLLYIIYFGLTTMEIIFLLFGKMPLYDAICTSLGTAGTGGFGIKNDSFCSYNVYLQWVVTIFMILFGVNFNAYYLLLFGHIRDALKVEEVRYYFGIIIASVVVISVNIAHMCTGVFDAITKAAFQVGSIITTTGFSSTDFDRWPELSKTLLVLLMFIGACAGSTGGGIKVSRIVIAVKTIRKELNGYIHPKSVKKLTFEHKPVDHDVIRSINVYFMTYAVIFIVSLLLVSVENYDFTTNFTAVAATFNNIGPGLSLVGPTCNFGFFNNFSKYVLMFDMLAGRLELFPLLILFHPSIWKELFIQADKKVKGNRKEKQNVRMMFKKGVVPSQGLRIIIVGCGKVGRTLVEQLGKEGHDITIVDKNRERISQVSNIYDVMGIVGNGASYKILQEAGIDDADLIIAVTGSDELNLLCCTIATQVGNCAAIARVRTPEYSQEAKYLRDKLGLALIINPELEAAIEMAHILHLPSSLEVTNFAHGQAQLIKYEIPEGSILDGTKLMDLGTRHHANILIGAVERDDEVTIPSGDFVLRKGDKLSFVGERRHTKEFFSHIGVNTHSVKNTLIIGGGKAAYYLAKQLISRGIKVKIIENSFERCEELSILLPDAVIINGDGTEQALLKEEGIETCQSFVPLTGIDEENIMLTLYAKQVSNAKVITKLNRITFTNVINSLDLGSVISPKYITSEAIIAYVRAKKNSMNCNIETLYHMYDSRVEAIEFFVSENSNVTDIPLRDLKLKKHLLICFINRNGKIIIPTGNDSIQKNDTVMIITTHTGFTNLQDIMEMGIAELGFSDHVPCPFKDGYVSGIRMTMEQAPEYVYAIRELGKEYASDIKLYVGFEAEYIPEFFKEQKAMFDRLGCDYMIMGQHFMKSEQTGPYTGTPTDDESRIREYVDIVIEGMKTGMYSYLAHPDLINYQGLDSVYEWEMTRMCKALKELDIPLEINMLGIGAGKHYPTDRFWCIPHDIGNKVILGLDAHTVDNICDVESYEKALDIVRKYDLNLIDRIEIMIITEEKYNEELTRCVLPFIRLNFEDGYMKSADGTRIHYGYVTTPVAKAAIVISHGFTECMPKYYEMIYYFAKAGYSVYMVEHRGHGFSERSVSDMSMVTVNSFDDYVSDLDMFIREIVMKREGRRPLYLYGHSMGGAIAALYLEKHPEVFTKAVLSSPMIEMLYGNFSHFAVEAILFVASVLNWNDKYLPSQTPYTDEYDFESSCCLSKARYDYIYKCKVEEERYRTNGATYRWCRAGRKASKYIKKHAQEIKIPVLLCQAGKDYLVSNTAEDEFIAKLPQGIKKVYPDSKHEIFNADDDTLEKFYSDIFDFWAMSDEVLDDVMIKGSCKGKADAIVNCQCNIESAPVRCEQAERCMFYSYYKCSKQWKRLAMKRVLVLSDSHGNVGNMIRAVKREEPDMILHLGDCVVDADALRREFPHITMVNVPGNCDFSRGDTERLIDIDGYKVLMCHGHTYGVKLSYMHLELHAKEIGADLALFGHTHKLFYDKHNGLAMMNPGSIGAPLWGCMPSYGIITFDKEHDVMKLDVDYIEYMVKVVKFGGSSLASAEQFTKVGDIIRSDESRKYVVPSAPGKRNSKDTKVTDMLYACYDLAENDQDFKVMLRKIKDRYDSIINGLHLKLALDEEFKIIAENFKAKAGADYAASRGEYLNGIIMANYLGYEFIDSATVIFFDENGNFDAEKTDKVLSKKLEQTEKAVIPGFYGAGPDGKVVTFSRGGSDITGSIVSKACHASMYENWTDVSGCLVADPRIIDNPQPIKVVTYRELRELSYMGASVLHEDAVFPVRKAGIPINIRNTNDPEAPGTLIVESTCQKPDYTITGIAGKKGFVAVNIDKDKMNSEVGFCRKALQAFEENGISIEHMPSGIDTMTVFVHQAEFEGKEQQVISSIRRLAHPDIIDLESDLALIAVVGRGMKSNRGTAGRIFSALAHANVNVRMIDQGSSELNIIIGVSNDDFDKAIKAIYDIFVVTQLMQKDTIIYVTDQRQKYLADMLGGEQTDCRNSGGIDYERVGNIVFPTPFSKLKLINSDIEKLKHNIIINNIAVWGGMMPECFPGVDRGCDFMRDETVIEQNAIVTAEATASIAIQKSIHGIYGSKVLVSGFGKCGKAMARVFSAMGALVMVMARRKQARCEAAELGYETVDFNDPAKACFETLFLINTVPDRVIDESLIMILQKDAIIIDIASKPGGCDFEACKRYQINCTHALGLPGIYCPKTGAKILYDCMKRKGMTEGLWLFRIAPMVISDCTVGMGITGSFCSFEKTKDVAKRLVDSFTHVTPVYSYNAQMMNTRFGKAGDFMHTISEITGDEGIRTLQEAERVGPGKLFEVMVIYPCTGNTAAKLANGIVDTPVLLAAKAHLRNGRPLVIGISTNDALGINFKNIGKLMNMKNIYFVPFGQDDCVKKPNSLVCDGKQVVGTINEVMAGRQIQPVILMSYIYKTKGTCSTQIELDLDGDVVHNVKFTGGCNGNLKAIPKLVEGLTVAQVEEKIGGIKCGFKNTSCGDQLAKACREAYEAQKNNMSALSKIFGSHSERELKRIYPIADKVESYKEAMGKLSDEELKDKTREFKKRLEDGATLDDILPEAFATVREAAKRVLGMEHYRVQIIGGIILHQGRIAEMRTGEGKTLVSTLPAYLNALEGKGVCIVTVNDYLAKRDAEWMGQVHEFLGLKVGVVLGGMDNDERREAYGCDITYITNNELGFDYLRDNMVIYKEQLVQRGLHYAIIDEVDSVLIDEARTPLIISGQSGKSTRLYEACDILATQMKRGEDVPEYSKMDAIMGIVQDETGDFIVNEKDKVVNLTQDGVKKVEQFFHIENLADPENLEIQHNIILALRAHNLMFKDQDYVVKDDEVLIVDEFTGRIMPGRRYSDGLHQAIEAKEHVKVKRESKTLATITFQNFFNKFDKKAGMTGTALTEEKEFRDIYGMDVVEIPTNKPVARIDLQDAVYATKKEKFKAVVDAVKEAHEKGQPVLVGTITIETSELLSGMLKREGIPHTVLNAKFHEKEAEIVALAGQHGAVTIATNMAGRGTDIKLDDEAKAAGGLKIIGTERHESRRIDNQLRGRAGRQGDPGESQFFISLEDDLMRLFGSERLMGVFNALGVPEGEQIQHKMLTSAIEKAQEKIEANNFGIRKNLLEYDQVDNDQREIIYSERMKVLNGDNMRDAILKMVQEQVEKSVDRCISEEIDRADWDLVELNELVLPVIPLDPITKEDIESIKNAKQLKQYLKEKAVMLYEQKETEFPEPEQFREIERVVLLRVIDRKWMDHIDDMAQLRQGIGLQAYGQKDPIVEYKMAGFDMFDDMISAIQEDTVRLLYHVQVEQKVEREQVAKISGTNKDESAQNAPKRRAAAKVYPNDPCPCGSGKKYKQCCGRVKMEFKLHSKYKPTGDQPQAIEQLVKGFKEGNQFETLLGVTGSGKTFTMANVIQQLNKPTLIISHNKTLAGQLYGEMKEFFPENAVEYFVSYYDYYQPEAYVPQSDTYIAKDSSVNDEIDKLRLSATAALTERKDVIVVASVSCIYGLGSPDEWTGMSISLRPGQERDRDDLARSLIDLQYTRNDMDFHRGTFRVHGDVLDIFPANADDTAIRVEFFGDEIDRIVEVDVLTGEVKCSLEHTMIFPASHYVVSQEKINEACLNIEKELDERVKYFKGEDKLIEAQRIAERTNFDIEMMRETGFCSGIENYTRHLNFAKPGEPPMTLIDFFPDDFLIIVDESHITIPQIGGMYAGDRSRKTILVDYGFRLPSALDNRPLNFEEFEGKIDQMLFVSATPNKYENEHELLRAEQIIRPTGLLDPEISVRPVEGQIDDLVSEVNKETANHHKVLITTLTKRMAEDLTNYMAELGIRVKYLHSDIDTLERAEIIRDLRLDVFDVLVGINLLREGLDIPEITLVAILDADKEGFLRSETSLIQTIGRAARNSEGHVIMYADKITDSMRVAIDETKRRRKVQEEYNEAHGITPQTIQKSVRDLIAISKKVAADENALDKDPESMSKKELEKHIADIEKKMKKAAAELNFEAAAEYRDKLIMLKNTLRDVKMAKKERKYIKIRGASEHNLKCVSLDIPRDEFVVFTGLSGSGKSSLAFDTIYAEGQRRYMESLSSYARQFLGQMEKPNVESIEGLPPAISIDQKSTNKNPRSTVGTVTEIYDYFRLLYARIGIPHCPKCGRAITKQTIDQMVDTVMALPERTRIQLLAPVVRGRKGEHQKLFERAKKSGYVRVIVDGSMYELSEDIPMEKNIKHNIDIVVDRLVVKPGIEKRLTDSLENVFELTEGNAIVDIVDGEQMTFSQNFACPDCGISIDEVEPRSFSFNNPFGACPTCYGLGYKMEFDPQLMVPDSSLSISEGAIQVMGWQSCTDPKSYTYATLRALHEGYGLPLDTPIDDLSADMKKLLFYGGDGRVLKVRYKGQRGEGVYDLVWNGLVDNVERRYKETFSDTAKAEYEQFMRITPCTSCKGQRLKPSSLAVTVADKNIYEMTSMSVKELVKFLADIELTEQQHYIGDQILKEIRARVGFLQQVGLDYLTLTRGTASLSGGEAQRIRLATQIGSGLVGVAYILDEPSIGLHQRDNDKLLGALMNLKNLGNTLIVVEHDEDTMRAADYIVDVGPGAGSHGGEIVAAGSLKDIIKCKKSLTGAYLSGKIKIPVPQERRKPSGYITIRGARENNLKNIDVQIPLGIMTCVTGVSGSGKSSLTNEILYKHLAKSLNRARCIAGDHDGIDGLEQLDKVIDIDQSPIGRTPRSNPATYTGVFDMIRDLFASTPDAKAKGYKKGRFSFNVKGGRCEACGGDGILKIEMHFLPDVYVPCEVCGGKRYNRETLDVKYKGKSIYDVLDMTVEEALEFFKNVPKIQNKIQSLYDVGLSYVKLGQPSTELSGGEAQRIKLATELSRKSTGKTIYILDEPTTGLHFADVHKLVEILRRLSDGGNTVVVIEHNLDVIKTADYIIDMGPEGGDGGGTVIAQGTPEEICEVKQSYTGRFLKQYLEKDKDKLMVGSDIGIDLGTASILVYIKGKGVVLKEPSVVAFDRDTNKIKAIGEEARLMLGRTPGNIVAVRPLRQGVISDYTVTEKMIKHFIQKALGKKSFRKPLVSVCVPSGVTEVEKKAVEDATFAAGARDVKIIEEPIAAAIGAGIDISKPCGNMIVDIGGGTSDIAVISLGGSVVSTSIKIAGDDFDEAIVRYMRKKHNLLIGERTAEDIKIKIGTCYPLPQPETIEVRGRNLVTGLPRTITVSSEETEEALREATLQIVEAVHSVLEKTPPELAADVADRGIVLTGGGSLLRGLEELIEEKTGINTMTAEQPMTCVAIGTGKYVEFLAGKRDEEFMNKIKDIGRGVINLVFPPRCPVCDGIIGPVERYIHSRCCEKLFPVEQPQCMRCGKPVLSERREYCDDCARALEHHRQMREDDSYRQGKALFAYKGSIKQTMYRFKYSNRREYAAYFAQTAVERYSDWILSCGIDVIIPVPMHRKKMRQRGYNQAECFARALSEKTGIRMAKGLVRRVKNTSPLKTMGYVERRNCLEGAFQVADSIVQYDQILIVDDIYTTGSTAESIGHEIAKKCPGRVYVLCICIGQGSMRISNCKGCGRIFNVLSDEQYCPNCQKKMDEKFDIVKRFVEDNPNVPVETVAKETDTSMKQINRWIREERLSFSPDSSYGIPCENCGRMIRTGRFCDECKTKLTNTLRSALDTPKSQDRQLWQQDDKNRMRYIKMINEEKVRELFNIALCDSKSDDSRVQKQSASYYGWDYIWKEGLKSFFTGTFAFAGLVVMWVAVNAAELLDRINKLDFKAMGVTIGILYIAFMAVYIFVTIVVYTARYKAGRREVRKYANHLKAVGRIYSREEKIKRMNKLLEIKDKAVKFCGEYEHFILPVVRFAVAFIAFITIDLNIGYMAKISSMLVALLLALVCALLPVNAILWIASIMILLDMYALSIEVFAITFVLFLVLYFVYFRFAPKDGMLVILTPICFQLHIPSVMPVAAGLLRRAYSVVAIICGTLLYYFFDGIRQNASALAEVVDKKGQSTTKLNVTMGQLLDNKEMFIVMAIFVITTLVVYQVRRLKINNSWTVATIAGGLIQLVALVVAYLVLGLPEKIIWLVLSTVAAIFAGVVIQFIFMNLDYARTENVQFEDDEYYYYVKAVPKKMIAKEEKVVKHFGNTGSLGKKIPRHNQENISKEAIAKDLEIDENIFEDDKMDNVSGVLIRFKDQFLTFTNVPGIKIGVIDIIEILIISVLFYHILLWIKTTRAWNLFKGLIIILLFVLVAALFQMDTILWLAEKLFNIGLVALVVIFQPELRNALENIGGKTFLGDFFNTGRGEIEKFSDKTIDELVRACFAMGRVKTGALIVMEDEINLGEYIRTGIDVDAILTSQLLINIFEKNTPLHDGAVIVRGNRVVSATCYLPLSDSLSLSKDLGTRHRAAVGVSEVSDSLTIIVSEETGSVSTAYKGQIEHDIDADHLRTQLKLLQNRHREPGKFELIKRRFKNGKEASKNLHKMGKKLLKTFTNNIGFKILAIAFAFILWLVVYNLNDPVKTKTFTTTVTVTGRDSVVDKGLWPTIKDSEKTISFSVSGKRSYLNELDDSDFYANVDLANIIVDKDDTNKASVKVDIGCTKYRHSITFNGGDHMLPLSVEKYMQKQFEVKVSVVGSLSGAKALGNKPQANPKVVKIGGPESVVSTIASANVNIKVDDNTIISDNQITDRGDLTLIDDNGDEIDISKLDVDSQYQSIAVTVDVLSTKEVPIKCTTTGSPAGGKSVLGVELSEESVMLKGNAEALNNITSIDVGPIDISGATDDISTSVDLTGYLPDGVFIVNSYKTKLSIDIKVETNATSTMTLNSSNITYDGLEDGYTLTFVTDKSSVVVSGTQSDIDTLSGTTLKGKIDVTGLDAGTHTVTVKPNLDETKYTWGEIKVQIVIGRKGDGGGTTGTDGTGTASGSITGGTTSGNTGSGSTGAGGSSSAGTSSGSTSSGNTGNNGSDSSSHMVAQKIIIKNPTGLHLRPAGNLCKEAMKFKSKVTFIYDEKNVANAKSVLSVLGACIKSGDEIELICNGEDESEALEYLIQYIKDGLGEMEKLLTIVVPAYNVEKYIKNCLDSFIDLSVLRSLEILIVDDGSTDSTAGLAHTYEQKYPYSFKVLSKENGGHGSTINYAIPRATGKYFKVVDGDDWLDKSLLPQFVQLLKHTHSDVISNDFNLVDDRTKKVTKRRKAVSNSYHYNREWGFAEAVMDPLITIHSMTIRTDVLQKNDIRVDEHCFYEDQEYILYPIPYCTSITFSPLPLYQYRLGRSGQSVDIKMMIKRHDQHLKVLDALFEYNNVHGNLQTYKKQYLERGIAEAVDDEYQIFLAKGNDTRNVEQMKKFDEMLREEHPGVYQACSRKSVWMLRKTGFKIFPMAAWVYSRLRGNMSKILSIIIPTYNAEKFLNKGLSSFLVCRDTDAQTAQHNCKMATEGCFEEIDIDKAILDKLEVIVVNDGTPDRSVEVAQKFVDWYPDTFVIVNKTNGGHGSAINTGVEHVRGKYLKVVDADDWVDTLALKHLVEYLEHVDSDAVIQSFRYYDISKDEYRPADVSVPDFTREYNLKDIVNMWDDVFDGLSFHGVIYNTGFYKALGYKLTEHVFYEDQEYATVPFSYAKTVRFIQEELYVYRVGDVNQSVSAASQVKRLPDLEQVIFNVLEAEKSFAKMPQGGKEHFIRKTSGIITSYYQIALIKNTDRQSGRAIVEQFNMKLAQKSALMYEAVQRKYKVFRMFNKLHVSNSFYENQFAKLLEFAKRVGRADRLYRKMETENKKILSIIIPTYNAAKFLDKGLSSFIIDDNSLLNMLDIVVVNDGSTDNSVEIAQKYVNKYPDVYRILNKENGGHGSAINEGVKIIKGSYFKVVDADDWVNTDVLKETICYLRDNENKHENFADAVLMSYRSYVLQRENTDEYPYDDKYITKNGGPYNAGYVDEHLYDFWWGLSLHGVIYNTQFYRNTGLTLSEGVFYEDQEFSIIPMAYAESIYAYDKALYEYRVGDVNQSVSIESSLKRLDHYEKVIMRLIEAGRDAEHFSIGGKQLWFDKTSKFINDYLQLCLIRNTDKKQLRKRMKLFVSQIEKKNTDMYKCVNKNYKVFCALNKMHMSDKVYQNYFIRLLHIVRHMKKKSIKLLVVLACVLMALGMAGCGKKAYKTFPEKYKLASVDVGGMTADEAKKAIKTAVGKYKISVKLDDASFDMTAKDLGLKYNDKADLQELINAANKDKKPEKQVKLFKMDKSDELETALVDSYITAKTQSQSDATAQSDTDAEANDDEQKKAEADTQTFDIRSIVPYRATIAYNAEAGQFEGVDGVSGDAPVYDNAATNLTSAVKELKDKVELTSATGYVDGEKAADSELVKKALKEANAYLDVTVTCNFTPATGEAATEAVGKDQIAQWLIVGNDGLSVSLDGENMATYCTELAKKHDVSKKKTGQFKTTGGSIINVPVTSSGQTVDGNKLYEAIAEAINNKKSATVEAVYSEAKEEETGEYVTYGGNYCEVDLTNQMVYVYKNGELVVSSQCVTGCISKGHGTPTGVYSIFSRDKDRYLRGDGYKSWVNFFIPFNGGIGFHDASWRSTFGGNIYMYSGSHGCINMPYSAAKKLYENVTLDEKVIVYGGVDKVAGKAQSFGGAGSYNVTEGDGAFNLGVTAEDNAKLTYSSDNEGVVRVDENGNVTIVGVGTATITVKSEATTSYKAGSKTITITVNAKPQPNQTPSVTIGCGNKTVTEGDAPFSLGASASNGAGLSYKSSDPSIASVDAAGNVTIHRAGSVQITAIAGEMAGWNSASSSITVTVNPKPQPQPVAPTEPSEQPQQNMENNEPIRDQEIEIDLVALFHELVKHWKALVASMVLLAAVFGLYSKITFVPEYEASAEMYVLSKSTSITSLADIQVGSSLTNDYEYVITGRTVLSQVIDNLDMDETYEQLSRRVSIENPTDTRVLKIVVTDTDLEASKTVADEIAKVSSQYIADNMDQSQPKIIQTAYASKTPVNNNILKNTVIGAVLGLFLAAGIVVLGYMLDDTISNADDMEARTGLKVLASLPVDEAEYDGAKSKRRKNKKKQSSKSDDSKSKKRAIMETVVINQIKDQSYTMKESLRALKTSISFSGKGVKSILFTSSLPNEGKTTVVMDLARSMADSKKSVLVVDTDMRKSVLVGRIRAKLESGGKIYGLSHYLSGQVSLDKVIYATNIKGVFILFAGHEVPNPTELLETEGFKELIEFGEKNFDYVLVDTPPTGAAIDAAVVGKNVDGAVIVAAQNATSSRAIINTKRTLEDSGVKILGAVLNKCRFEESKYGHYYGNYYGNYYGNYYGRDDDENMKKKKNIIITAVMIVLIAIIAIILVKINSSNVKNKEAKDIKPGTEAVKTKADTQTEDDNITDKSGIEEFALFGVDSRSDQLDKGTRSDSIMIVRVDHDAKKIRMVSIFRDCMMNIDGHGYQKVTHAHAFGGPELAVDTLNKNLDLDIKNYVTVNFNTVGEIIDEVGGIVQDIDASEAKVINGYIDEVNKIRGTSSSHIDSAGTYTLDGTQAVAYSRIRYTAGGDYKRAERQRTVLFKVFESAKQMNTAAKIKMVSDLIGHVNTNYNTDEILSVFKNLADYTVEDSTAYPQVFYGGKVDGAWVEVPTTLADMATGVHQFLEGDTGYTPSATVNEYSSALSGKVSGPNNDLTNTNFGDMNFRQNGDKYLITIEVIALIVVLVFGAVHFVMPGNKSNKKITESQQETQNPTQETDGTKQVQVDGQQTAPAFTPSDSVKTKLSSMTTEEKVAQLFITRPEEITGVSEFTQAGNKTKAAIGTYPLGGFVFRQENFSGEAAVTKMMSSLQSFSQERLGVNLFLAIDEEGGERLPLASANGYEAQQAPSQLGDADAAGSSAGKIGSYMATNGLNMNFGPTADIAYGDNADNDTYAFGSESATVGDCVAAQVSSYNSAGINSVAKSFPGKGKATTDSATGMLWMTDKLEDLEASDFVPYQKAIEAGVPAVMMGNVICQSVTGEETTPCSTSAGAVNYMRTTMGFNGLLITDDLSDASLNKVCTQDEAAVAAVKAGMSMLYVSTGFESSYNAVLSAVNSGEIPAEKLDDAVGRILTTKGIMSNCFNPANILLPNDGIDMEKWSVIACDQFTSQADYWDAVEKYVGDAPSTLNVVFPEIYLGTIAKQENDCNSSGEGVKNDKETGRKTKYASMTDDERIKYINTTMDTYLTDGTLKQAVADGYVLVERTTESGVRLGIVGLIDLDDYDFDPKKKTLIRATEGTVISRIPPRVKIRENAAIELPHVMLLVDDPIDRQKIDGCQGASQEDAVNIAAVKHGIIEYVYAIRDTLRKLYDTELMQGGGHIRGYAVEGEAARQVTEAFAAKQNSCGGFLFAVGDGNHSLATAKTCWENIKKSGKFTEEQLKTHPARHALVEICNLHSEALEFKPIHRLLTNVDVKDMLSFFEAEITKQGLESAEGDEIVFEYVESGATSIKNSGINITNRGDRLPVEILQGILDKYLETHDNVEIDYIHGDEALHGLVKETKGCGIFLQSIDKSTLFPAINAGGVLPRKTFSIGEANEKRYYMECHKISMMGKYFGTDGFRGEANVNLTAEHAYQIGRFLGWYYGELKKQKQLDEPAKIVIGKDTRRSSYMFEYSLVSGLTASGADAYLLHVTTTPSVAYVARTDDFDCGIMISASHNPYYDNGIKLINSNGEKMDEETILLVEDYIDGKLRLFGQEWKELPYAHKDAIGCTVDYVAGRNRYMGYLISLGVYSFKGMKVGLDCANGSSWNMAKSIFEALGAKCYVINNEPNGLNINNNAGSTHIEGLQKYVVDNGLDVGFAYDGDADRCLCVDELGNVITGDHILYIYGKYMKERGKLDNNTVVTTVMSNFGLYKALDELGIGYAKTAVGDKYVYEYMQQNGCRIGGEQSGHIIFSKYASTGDGILTSLKMMEVMMARKQKMSQLCEGLSIYPQVLQNVRVADKAEALANPEVQAAVDQVTAELGDTGRILVRESGTEPVIRVMVEAESEEICQKYVDMVVAKLKMPEILIIFILCAGIIVIGIILCIIIKVSHMSDDEQKKDDERQLEFIRAYKEHKKGHMSLKDYIIRDIQEKFKYLPSAVYLALICIAMYIFVCLLRYLFTMREVSQADERRKKIVGKIWHMLFCGTFVAYMYTLIMIVYYSREPGSRTGVADMVLWSTWGMTLQMHAYFIENIVLFIPFGLLFPLVFKNWMRWFTIPVGAFISAAIEYTQLVTGRGYCQLDDFVTNTAGSAIGFFIYLILYAGWLIWKKIRMEKNKISIVVPCFNEKEALPLFYNKITWVLNQMSQASEAEGLSYELIIVDDGSMDGTLDVAKELATNDSGVKYISFSRNFGKEAAMYAGLQHAVGEYVAIMDADLQDPPEMLPKMYQVLTKEGYDAVGTRRVTRKGEPAIRSFFARKFYRLMSKISKANMVDGARDYRLMNRKYVDALLSLKEYNRFSKGLFGWVGFKVKWLEFENVNRVAGETKWSFWQLFLYSLDGIVAFSNAPLYMASIAGVFSFIVAIAAMLFIIIRRLVFGDPVAGWASTVVIILFIGGIQLLSIGILGLYLSKLYLEAKDRPIYLIGESNIEKPTEKNMKNVLEWLEATVEKYPDKPAFSDTECSITFAQVYDIARNTGAYLIEQLGVDRTPVAVFAGRKMVTPAYFLGVVYAGRPYAPIDASLPDKRIEKILENLCPRAIVADRESLEHVESIVDELAKSEGFDRPQIFIAEDISRFDQVAGADSNCKISESAGDAVTDSENDTDGGVVAGCAGKKDDSSLEKLATVRRQMSMTDPLYIIYTSGSTGNPKGVMTSHLSLMTYINAYCDVMHIECDDVLGNQSPLDYIAAIRDIYLPLKTGCSTAIIPKEYFMEPNVLFDYMNDKKVSSVGWSVSAFTILTSLGAFEEVGLKSLRKICFSGSVMPCRVLRKWQENLPEAHFVNQYGPTEATASCTYYSVDHTVEEDEVLPIGKAYDNYRVFLIDEHGNEPAVGEQGEICVCGPILALGYYNDPERTAAAFTLNPLNKAYPERMYRTGDYGRLDEDGILHFCGRMDRQIKHMGHRVELDEVEHAANVVEGVAESCVIYNKAKEVLILFYTGDCDRRSLALALRDELPGFMVPRKIKKLEQLPKLPNGKYDMKKLEEMMRDTILEILEELRPDVDFEKETKLIDDKILESFDIVSLVSELTDEFDITIRPKDLVPENFNSVDAIEKLVKELVEEMRQTPYYVFDTDEFAKRAAMIRAALDCKGGRRIPLCFSIKANPFLLHRLPEGLDHVEVCSPGELEICIALGVKPESIIYSGVMKEKCDIERAVSYGAGILTCESIRHAALISEVMLERMPEGAHEAGLVEKKAQVILRLTSGNQFGMSLEDIEYIISHPDEFKGIMVIGIHYYSGTQKSLRKINKDLQKIKSALTGLKEKYGFEPQLVEYGPGLCVEYFEEDWQEREKQALDEAAEVLREFAVEYPLGIEMGRFLAASCGKYYTQVKDLKSTGDANYAILDGGIHHLNYFGQRMAMQVPPISIYRAAGVEFTELPDTDYTLCGSLCTVADVLVREVKLKKLELGDVLEFGHCGAYSVTEAPALFLSRQLPAIYAYSKEYGYECLREHIPAAEINLAGKKLMKYDYIVVGSGLYGAIFAHEAKAKGKSVLVVDKRPNIAGNVYTEKQEGINVHMYGAHIFHTNDKRVWNYITQFAEFNRFTNSPVANYKGELYSMPFNMYTFNKMWGVVTPEEAAAKIEEQKKEITGEPKNLEEQAISLVGRDIYEKLVKGYTEKQWGRDCKELPAFIIKRLPVRLTFDNNYFNALYQGIPIGGYTKMVENLLDGIEVRLNTDYLEHKAELDALADKVVYTGPIDAYFGFKLGTLEYRSVRFENETLDIPNFQGNAAVNYTDRETPWTRIIEHKWFEFGKDEDGNDLPKTIISREYSSEWKAGDEPYYPVNDEKNGQLYARYKELADKETGVIFGGRLGEYKYYDMDTTIASVLDMCEKELGMKLPGYYSSGEFAKKAHITKKTIRYYDEHNILKPSYVNENGARFYNDDDFARLQQILFLKYLGFSLDDIKEMTLRNTDSNVMSESLHMQLGLVEERIEQMKLMKSALQEASEVIDEGRSVDWSHMLELVNINEMEQKLKQQYRDASNISARINLHRDFSMNPVSWFSWVFDECSFFEGEKVLEVGCGDASLWTQNIDRIPADMQITLTDISYGMVRDATRNVGADDKRFTYEVMDAHRLYKPDASYDCVIADHVLFYCDNLDAVCSEIQRVLKPGGVFVCSTYSSRHMKEINDLVQEFDDRIELSAERLYEQFGKENGEAILGKYFGDVSWHGYEDELVVEKAEPVIEYVLSCHGNQNRYIVDRYKEFAAFVRTKTEGGFHITKDAGVFIARKMKGIILAGGSGTRLYPLTMVTSKQLLPIYDKPMIYYPMSVLMNAGIRDILIISTPQDTPRFKELLGDGHQFGVNLTYEVQPSPDGLAQAFVIGEKFIGDDTVAMVLGDNIFAGHGLNKRLKAAVENAKSGKGATVFGYYVDDPERFGIVEFDKEGKAISIEEKPEHPKSNYCVTGLYFYDNNVVEYAKNLKPSARGELEITDLNRIYLEKKALNVELLGQGFTWLDTGTHESLVDATNFVKTVETHQHRKIACLEEIAYLNGWITKDEVLKTYELVKKNQYGQYLKDVLDGKYREQLYMTIIVTGGAGFIGSNFVFHMLNKYPDYRIVCLDCLTYAGNLSTLEPVMDNPNFRFVKESITDRDAVYKLFEEEHPDMVVNFAAESHVDRSIENPQVFLDTNIIGTSVLMDACRKYGIKRYHQVSTDEVYGDLPLDRPDLFFHEDTPIHTSSPYSSSKAAADLLVLAYHRTYGLPVTISRCSNNYGPYHFPEKLIPLMIANALNDKPLPVYGTGENVRDWLYVEDHCKAIDLIIHNGRVGEVYNVGGHNEKTNLEIVKIICKELNKPESLITFVGDRKGHDMRYAIDPTKIHNELGWLPETKFEDGIKKTIKWYLDNREWWETIISGEYQNYYEKMYANRMKVFVTGVAGQLGHDVMNDLAARGYEGIGTDIAPQYSGADDGTAVTTLPYVSLDITDRDAVEKTITELKPDVVVHCAAWTAVDLAEDDDKKAKVHAINADGTQNIADACKKIDAKMVYISTDYVFDGQGTTPWQPDCKDYAPLNVYGQTKLDGELAVANTLEKYFIVRIAWVFGVNGKNFIKTMLNVGKTHDKLTVVSDQIGTPTYTLDLSRLLVDMIETDKYGYYHATNEGGYISWYDFTKEIFKQAVELGHTEYSEDRLTVAPVTTAEYGVSKAARPFNSRLDKSKLVENGFKPLPTWQDALHRYLQEIEFMLGCSRNTRKDIEIMGQIKVQKNVGGIEGLCIIEPTVHGDNRGYFMETYNSKDMQEAGIDRVFVQDNQSCSTKGVLRGLHFQKEYPQAKLVRAVKGSVFDVAVDLRSDSKTYGKWFGVELTEENKKQFLIPEGFAHGFLVLSDVAEFCYKVTDFWHLGDESGLAWNDPAIGIEWPQLVGEYPGSADGSGYTLEDGTPINLSDKDQKWETLENTFKFMKKKKKATKWIIFARVLLVLQLIASAMIFAMAVKTKMLPAKYIMFAAGGLLIMEFLVFALVHLGQNIMKPKASGYFKRGLGTFISILVIICSLYGTSVLSKVMGTLNDMTGNKNVMEDKIVVYVMKDDPAETIDDAKDYTFAYTDSYGYEETKETIDDINKKTDSTINTKPYASAIEMVDALYSGEVKAMILNTSYVSVITDTEGYEDFETKTKVLYAYTKTYEVEKTEKDVQVTKEPFVVYISGSDTRSKKLAKSRSDVNILAFVNPESRQVLLLNTPRDYYVETSVSHGTKDKLTHCGLYGIDCSMKTLASVYDLDTINYYAQINFTGFETLIDQIGGVTVNSEQAFSSSMDSYKFSKGPNELNGEEALAYARERHNLPDGDNGRGRHQMDLISAVIDKMTNSTALLTNYSGILDSLEGMISMDFKSSDISSLINMQLSEGGSWNIKSFAVTGQGTKKTTYSMPIQKVYVTIPDESSVEHAKQLIQKVMNGETITDDDLKMDKNKSISTQKINRWDVGYFILYGIVLAKCVYETTMFSQQVLVGTFKLFLAAMVLYTGAKVLFSGYYSRKEQLAIAVVVLIFGIVGLQTGYYELLQPVLLIAGAKNVRFDNILKVYTAVVSVMLIVAAIASQTGVIADVIGYSPRNAAAARHSYGIIYPTDFAAHVFYLILAVSCLGIWQRVWENEKYRYPAGLRWLIVIVAGVFIYIKAGAFTGTVCLTGFLVLTGLIYLLERKNLARRVCEIFKYLPIVWAGLFLALSYFYSASNAVMVKIDTVLSQRLMVSHKVWSEYSIKAFGQFIEEQGWGGIADPTGIDPAKYFFIDDMYLRMLFEYGIIVFAVVLILLIVIGHRAIGAKQYVLFAAIVMIGVHSFMEHHLLEVAYDPFLLVLLAGIDTADEEKSGRKIMNSKKWIIQYLEVLLDIIVMFTSYLIANWYKFGFFRTGLINHTEHYLTLFLVELVAYVVVHFVAFADDNLINRKLFPEIYNVLKMYVYVGAITVGCVYFTKTSEYFSRGQMGMTFILSTIFTVIVRQLLKRLVTKEYHRSGANEKIMLVTTSDQVERVIKKIKTTRNWDFRISNIAILDCDMVGEIVDKIEVVATADNLLQVISTAEIDSVFVHLPDNYPFKQREFVTVLNEMGKTVHLNVNEYEAKVGEHYMDFLGKYAVVTWKNKTYRVRHLLIKKLIDLLFGVAGSILIVPVWFVAFMGKIVTGDHGPVLISLVRVGKNGRRFYYYKFRTMYMDARDRYDKWLLDGKKGKDPRFTPVGRMLRALRLENLPSAWNVLWGDMSMVGNPAPSLPEFIEYSAFHRKSLSVKPGIIGFWQVYSREHRLLTEEEQSEYDQEYILNWTVGLDLRIIFRAVCPLCRSVSKRELVMPAQLVDEMRCLSELVKDRMPLSYDMQAYQTAEDSGKPVYRFIKRLVDIVASLLGLIVLSPVFIILAVIIRMSDGGSVFYGHTRVGYKGKKISVYKFRSMKTNAGDLEKILTPEQLEQYVKEFKIDNDPRITKIGGFLRKTSLDELPQLINILKGELSIVGPRPIVEKETEIYGKDIAKLLSVKPGLTGYWQAYARNNATYESGERQRMEMYYVEHCSLWMDIKILFRTVFSVIREDGAQMKKLDLNSITISLIIPTLNAAEYMPGLIDILGRQTRKTDEIIVIDSESEDATVRMAEQAGFRTLKVKRSEFDHGGTRNYAVAMSKGDIVMFLSQDALPSDEHYVENMLAGFENEEVVMISARQLPRRDAKPDEALVREFNYPAEGFVRSKEDIPRLGIKAYFFSDVCSAYRRDFFEDIGGFESPLLTNEDMLMAARALRAGYKIGYCATAQVYHSHNYTFKQQYKRNFDVAVFMETYKDEIKCDGTTGEGIRMVLFIEKKLLKQFKIGAAVHCIFDSAAKFLGNRAGRKWKRKNAMHSTDKIAILMATYNGEKYICQQIDSILSQTCKDWELYIHDDGSTDNTIAVVESYVEKYPNKIHLIDGKSTGGAKYNFFYMFGQVEAPYYMTCDQDDVWLDKKIELTYDKMLTIENKADVPCLVYTELRVVDSELNTIADTMSGYQSLDCHKRTINQFILQNSVTGCTMMVNRALRDKMLRITDIDNTIMHDWWAALVAAQFGKTAFIDEPTILYRQHGDNSLGALGINKLSYIVRRVWQKKQIQESMRLGRLQAREFAKTYNLPADSLAVRYAALEGKSRRVRQRFYKENDMYKTGTMRRLGQAVWGMEEKFIKKVFGITLLVYFASICLVYLVSSKQFHYQETQSDTVSQSQVVGEFAEGDTIKQTFTVDSQYLEGVTVTPATYGKTAEGMLEAKITDTNGKNIADIDVDMSELSDNQPYDIKLPEKIKVDNNESYTLELICKSLDGDSQISFYYGNSIKMAKGEISKSYDDSTRVYVNNEGLEGELCLSIDGMNTIWFGNYYWIIMGAIGILLIVYFVVSLNKRKSGKQTVVIAFLDSVSHYKFLISQLVKRDFKTKYKRSVLGVCWSFLNPLLMMLVQYVVFSTIFSSGVANYPVYLLSGIVMFNFFNECCAMGISAITSNSSLITKVYVPKYIYPLSRAMSSLVNLGFSLIPLLIVTFVTGLWPRPAFILLPFPIICMMIFSLGMSYFLSTSMVFFKDTQFIWNVLSTVWLYATPIFYTENIITSPILLKAFHCNPMYQFIYFVRSILIDGVSPSPQHYLYCILLSVVPFILGFWFFKKNEDKFIFNLMNMIEVKDVSICFRMANDKLNSLKEFMIQKVKGKLKYEEFWALKDVSFNVKKGEVVGIVGHNGAGKSTILKVISGIMKPTEGTVVTHGNIVPMLELGSGFDMDLSGRENIYLNGSILGYSKEFLDEKFDEILEFSELGEFIEQPIRNYSSGMLMRLAFSVATIVNPEILIVDEILAVGDADFQEKSKNKMLDLMSGGTTVLFVSHMISQIREMCDTVVWLDHGKVKMIGGAKEVCDAYQFKKSENDELSKLYFDDGTGFNERATFTQVMPMDGNIFKQVYEFPTKCQHVRYDPVEGTTISLSDLKIVAEDANVNIIATNGRQVDDVFYFGKDDPWIDMSFSHGVSSVEITGVVREVNEDAMMNSGIVLNIKKNGLFATAKKIKRKLDEENAYKIWQEKNRLDDNLLELQRRYLFKEDYKFSIVVPVYRTNAEYLRAMIDSIKAQTYSDWELCIVDASEYKSGEDKETINIIEKYLADDKRIKFKVLEENHGISANTNAAIEMATGDFIVFADHDDMLAPDALFECAKLLENEPDADIIYSDEDKIVAGGTKRFQPYFKPNFNIDLLRANNYICHLFVVRMSIAKQVGILNPDLDGAQDYDYILRCAEKTDSIYHIPKILYHWRCHENSTSENPDSKLYAFKAGKKALEDHIKRKKIDAKVEEGPYHGTYHIIYGYSKTTPITIIVVGDRIYDKACVDSIECSSKYVNKNYLFIEKKEQIKEVVKDIRTDYVWIINNRFEVKSLKCIEEMLGYLTRPEVGAVGAKICNKKYILQAGIDVDQEGSVIYPFKGYGRSEAGNFNRLVSTRDCYSVSSDCVMLDKSVLLSMIMPDKAGCENDLELILGKTLKKLNKYAVYNPYIEIEARMNTIKQNIKKVARPIYHKVVPEKVRARRAARLNRSLEYETWITMLEANENYDEKFEYNPKISILVPVYNVLDRHLIPCIESVLNQVYTNWELCLADDCSSWDSVRETLAKYEGNEKIKIVYRTENGHISRCTNSALEIATGEFVAFMDCDDVLRPNALYEVVKKLNENPNLDFIYSDEDKIDDDGFNRHMPHFKPDWSPDTLMSHMYTCHFGVYRRSIANEIGGLRAGYEGAQDYDFTLRFTEKTNKIAHIDKILYHWRERKESTALDPSAKPYIFEAAKKSKEDALARRGLKANLEMVDIMYQYRVNYISQTNPLISVIIPSKDNYKVLKRCIETLYEITRYRNFEVILVDNGSNDENKKLYQGLADKYNFRYIYEKMNFNFSRMCNIGAKEAKGDYYLFLNDDIEIINEEWLERMVGHAELEHVGAVGAKLLYPNSKKIQHIGVINIANGPVHAFIGYNDDNIYYFGRNKIDYNWLVVTAACMLVNAAKFNKVNGFNEDMPVAYNDVELCFRLVEAGYYNVVRNDVILYHHESVSRGNDLKSEKKFKRLMAEQKHLYKLHPYFKNKDPFYSSNLTQHAPDFSYNMMKENIGKCVVEECTKEFDICRKVVNAIDNIYVGNKCIIEGWGFYNEKPYNGNIQLLLKSDNKSYLITTRKIFRSDLAIHFKRKPGAELSGFICEFDKIDAGKYQIYVCCNGKATKTKRHIIINKMSKKNISKISLWILIFSILSLVTVAMVWSPRKELKIRGNADNLLERYDTSDIIEYSGCYINQSGQICINGVDPHIVFKKENIKNVTTIVIKLKDKVSGDLDVQLYFDDGNEFNENDSCIKTVFSGDDNVGFELTNKSLKQIRIDVDSDFNFDDIEIYSGKSIISIDKENMHYERIIYSICFTVFIISILLFIDKKLNFSDTIICFIGRKYKIALRDLLIFIVSLVIGAIIAYFVSGLKFMYSTWLFCSAIVAIILFILISYRTIKDKPEKLLVRLVFVSSITMLFVSPIGHISWDIDSHFKFAISSSSVAHIGLSEPELEVLTNGGNFIQNTDTYAQNIEKINTLKKNSDAIIKYIDHNISLTALPSGVVIALLRLFGANFFVIYKFGQIPIVLVYSLCCYFAMKRLHSGKMILAVVAMFPTSLFIASNYSYDTWVIGFVMIGMAYFVGNCQEEGVVSTKDTVIMVIAFAIAIIPKQIYLAFLIIPFLMKRNKIENKKKYYSICSMAFVIMLFDLLLKTIFETSKGGDVRGGAGVNPTEQILYIIHNPVEYTRTLLNFLKDYLSIRNMNGFIDHFAYLGIGTTTVAIIVFAFLVFTTLTDKREYDVKAYSKIVYIYDILMFFGTVVLIATSLYIAYTEVGSNTIAGCQSRYITPLIYPLFAVLGGSGIRLKFDYRVYNYIVMIIMQSVSMWCIYQYILIKMLMIKHEFVICAYKESKYLEDCIISLKKQKKKSNIKLATSTPNNYIENLCNKYQIEMFVNKGEKGIAGDWNFAYSCSDAQYITIAHQDDIYRENYSTEIINTFDKYPHALIAFSDYSELINGNFSDNGFNLKLKRIMLKNLRNHDKAYRIKNKRSAIRLGNAICCPSVTYSKEALCDYEPLFKTGFRSNVDWETWERISRAEGEFLYCNEILMAHRIHEESETSAVIGDNLRSKEDYEMFLKFWNRPVAKVLTKIYSLSEKENNVMNRLLIVIPAYNEEESIEEVVNNIKENYSQFDYVIVNDGSKDSTYSVCEKNKYNIIDLPINLGLAGGFQAGAKYAYLKGYDCFIQFDADGQHLPEYIDKMLKKLDEGYDIVIGSRFVDEKKPISARMLGSRLISTAIKLTTGVKINDPTSGMRLYSRKCIKEFAQEINYGPEPDTISYLIKNGAKVAEVQVEMKERVAGTSYLNFARSISYMFRMLMSILFVQNFRKRMSTSLRVILFVASLCVFFFIMKKIKKAKLKIEYALFWIVSSILLLILSIFPQIAYFFADICGIKSPVNFIFLFSIMVLFVHNFYLTLRISNLDNMINSLTEEIAVRDYYKKEEENESKMKVNKLLTIACHKYVSSETSEKNNFVWNMIGSMIFAAASMILSLLIIRIVGEDDGGIFAIAITVAQMLAFIEYYETRTFQVTDTKSTFEFGHYKAVKYILFVVSVVVSIVYSILTAKSNIYKCIVILLMCIYRFVDAYADLYEGTFQKDGRLDLTGKSQAFRTVMSVTVMLVVLIITKNMILAISLSILIAILGLIIFDVMPMKTFRNIAVIWNEKYILGILKNCFPLFIGSFLWSYILSASRIAIDAKMASNYSAYFQTLFMPVSIVNLFATFVMKPALTKLADEYASDYKKPFIVSISKISVIIVGFTIICIIGAWILGIPVLQILTGSKLIQYKMVLILLMFAGGINALSYFGYYVLTVMRKSGMIIIGYIVSAIVAKLANEYLVARYGIKGGAYGFLTSVMVLFLIFYFCIIYTILKKNTKRDMRKIKNELCNNRRLLSVVLAIIDVAFIALLLIGLCIGIFGKHTYNFSIEYGEEHSNKNYAQMYYAPSVKKMTEEDSINAYFENKKANFKIKMSLAEINNNLFRVDPINTLEVYSIKSITLSDFWGNSIEVSGSKLEKYISSRKDVEYEVHDDGLYITALTQDNMFILSQKLNYKVVKLFLNRQLVLFYIGTFCYLLFGILQFVLLCQNNDDKKHSRIFNFLSAFITYILTALGGALLYGFWYMQKNFKDVPIGQIIYHLNTPLEGTNTSSFSVIFISIILIIIICVLMVTFGLLIFRKKKNKWIYKFWMSLLGCIAIGYSIILCCFHFDIISYLKYTKQDSTIYEDNYVDGRDVAITFPKEKRNLIYIFLESMEMTYSDQSVGGAMSENYIPELTQISLENENFGIYGKLNGAYTTSGATFTMGGLVAQTSGVPINENLISNDTLNSKWESDNNYVPGVWAIGDVLKGEGYNQEFLIGSDKKFAGRSSYFHGHGNYDIFDYYTAIDRGYIDDDYMVWWGYEDEKLFEYAKNELNNLASKDEPFNLTMLTVDTHFTDGYVCELCQNQYDEQYSNVIACSSRQVSEFLDWIKQQDFYDNTTVVISGDHLTMDSDYIERQNATDFNRRTYFTIVNGAAVNEKPCVEREYTTLDLYPTTLAALGVQIEGNRLGLGTNLYSGEDTLIEKYGLDYINVELLKDSQLYRKKLLYGKNMKKVVALLLTLSMLISANTFVFADSAETGNSTESYQQQDNSENQIVTYLSVADPSVKKGDAVRIIVGLADGIDQSNARLTVENTDLNQSFEISGEMTEDGNLIFESSDLVSGCYTVKSLETDGYSVDFEAIGINSQFGIDTVVMDLNADAYAEDSDNSNSDNENTGSEVYDAVVINPDETSTQAAGNTISEAIAAAADVQQNNLFRASSAVNVVLDPGHGGNDGGAQASYGGKTYLEKTLNLKIAQYCKEELSKYKRVNVYMTRNDDHYVALEDRVNYAKSVGASVFVSIHNNSTTSSSVHGATVYYPNSSLNANIGAQGGALANEVLKQLVALGLANDGTRIRNSESGDTYTDGSICDYYSVIRNSKKAGFPGIIIEHAYISNQSDATNYLGSETALKKLGIADAQGIVNYFGLKQEDYHLIFDASYYLNNNPDVKNNWGNTAEAALQHFIKYGMAEGRRGNEIFDVHFYKDNNIDLQNAFGDNWYLYYQHYLENGIREGRQASENFDVISYKTRYRDLQSAFGDDYEGYVDHYISYGINEERDASPLRYKVDFVDNGQIVESQNVLCMRGAKAPEITKTGYVLSWDKAYNKIASDTTVNAVWAPVTVKLNFDAAGGNITNTSKNITYGGTYGDLESPERDGYTFIGWYTAANGGTQITKDTKVEVTSDQTIYAHWTANSYAVTFNADGGTVTANTKTVTFGNAYGELPTPTRSGYTFAGWWTAVDSGEQISFNSAVKTASDHVLYAHWVLNSVSVSYQTHVANIGWQNGVSNGAMAGTVGRGLQLEAIKINVKSDADIGVIYTTHVKNDGWHGNSFNGEQSGTTGQNKHVEALMLKLTGKDADKYDIYYRVHAQNYGWLAWAKNGEAAGTSGYAYRLEAIQIVVTAKGDMAPTVFYGGYTSNNAKAYISKTSTVPIINTNASVRYQSHVSNIGWQSAVENGSLSGTTGRNLGLEAIRIDLDGQPCSGGIKYQTHVQNIGWQNAVADGALAGTTGRALNVEAINMSLTGEMANQYDIYYRVHAQNYGWLGWAKNGQNAGTSGQNLHLEALQIVLVKKGQSAPGNNYGGIISKNTMAYIARVLSAASVLTIVFGMWTGVSQKRIATGNILLSIDNSTVKNSLLDFLRKEVIQPHLMKCPYCGDEMIRGYLMSSLDITFAVDNPIKAFRIKKSDDLELSKGSEGIPHCEAYRCSSCKKILIDYENRMFLIPEDIARYIDYSSVSKDECFKLTHDEYESGNIDRVVKYIEENMTSTITSASQFFALIXXXXXXXXXXXXXXXXXXXXGYFFYHMKKISLVVFPALTIVLEALPLGAVCTFAPSPTERVRETFSYFSLIPFGYANFAPLITAILTVVILLLSLISLKKDSVFNALFVLSIITAVISLMPLMYGLNNYSLVGALITIALVTESIFVKAQQKMIAIPNNIIFVPIHSASFLFGASSAPDKTPLWQKLAIKTSFIVHPSKCSFFNTTPSFFHFLMKPLTLMKLFLFLLLLISTLQPEYLESTSFIRCSRHFYSSVFFSIPTDTLLLAFLEYSQELRDFCDFDAVPDGSKFTRFKQDFLLDLRSSKTLDFVMLLFLSVPILAMGKPDIIYEDNDIIVCYKPAGIATQTRRIGQQDMESFIRNYRAAKNEPPYVGIVHRLDQPVEGVMVFAKNQKAAASLSRQIKEHTTEKYYRAASRGQGVSGADKEEDNKEDNHDLAWHTLTDYISFDKRTNTSKITSEKDRQAKKAVLQYGIISNECNKTEFDIKLLTGRHHQIRLQLANIGYPLIGDTKYGKTVSNNSGTGSKSGRTGFGVREQLALCSYKIVFDHPATGERLTFELPMGETLGRVHSVESFGSADGPGVRYIVFLKGCNMRCKYCHNPDTWAKCGENDGAKLMTPQEVLKTAMRYKAYWKQTGGITVSGGEALLQIDFVTELFKFAKEKGVNTCLDTSGNPFTVEEPFFGKFNELMKYTDLFMLDIKHIDDEEHKKLTGQTNKNILDMAQYLSKNGKKMWIRHVLVPGITTDERYLKQLREFIDTLKTVERVEVLPYHTLGVFKWKELGIPYQLEGVEPPTKEQIECAKRILNCQNMLKSFKTEINPTIEQKIKINKTIGTCRYVYNFYLGHNKTLYDNGEKFMTGKSFSVWLNNEYIPNNPDKIWIKEAYSKAVKKSIEDGCTAFTRFFKHQSAFPNFKKKGKSDVKMYFVKNNTKDCRCERHRLNIPTLGWVRIKEKGYIPTTKDGWKIKSGTVSVKADRYYVSVLVEIPNVKIANNSNGGIGIDLGLKDLAIVSNGKTYKNINKSTRIKKLEKKLRREQRCLSRKYENLKKGESTQKNIQKQKLKVQRLHHKIDNIRTDYINKSIAEIVKTKPSYITIENLNVSGMMKNRHLSKAVASQKFYEFRTKLKAKCDENGIELRVVDRWYPSSKICHCCGAIKKDLKLSDRIYRCDCGYVEDRDFNAALNLRDALTYEVAMNTSNITNYKPKDFAELLGVSVKTLQRWDREGTLKANRTPTDRRYYTYDQYLQFKGINIENDKRQVVIYARVSTRNQKDDLQNQVAFLRQFCNAKGIIIDQCIEDYGSGLNYNRKKWNELLNEVMEQKIKTIIVTHKDRFIRFGYDWFEKFCMKFNTSIVVVNNEELSPQEELVQDIVSILHVFSCRLYGLRKYEKQIERDEEIAKELQDGNKSDDMIEMKEWDGFEGRLWKEEINVRQFIQDNYTPYDGDESFLADPTDATNKLWDALQKLQKEERAKGGVLDMETEVVTGITAYGPGYIDESLKDLEQIVGLQTDKPLKRAFMPYGGIKMAVQAAETYGYNVSDKLKEIFTKYHKTHNTAVFDAYTPEMMKVRHAKILTGLPDTYGRGRIVGDYRRVALYGLDYLIEEKKKDKANCGCGQMTDDVIRLREEIAEQFKCLEDMKKLAEIYGYDISRPATNAKEAVQWLYFGYLAAIKTQNGAAMSVGRVSTFLDIYIKRDMDKGILTEQEAQELIDHFTMKLRMVKFARIPSYNQLFSGDPVWATLDVAGTGVDGRSMVTKTDFRFLHTLENMGPAPEPNLTVFYSSKLPQTFKDYAARISIETSSIQYENDDAMKPVWGDDYAICCCVSATQTGKEMQFFGARANLAKCLLYAINGGVDEKSGEQVGPNYAPITAEYLDYDEVMAKYDKMMDWLVDIYVNTLNLIQYMHDKYYYEAAELALMDTDLKRTFATGIAGFSHVIDSLSAIKYAKVKVVRDESGLAKDFEIEGEFPKYGNDDDRADEIGVWLLKTFMDKLKKHHTYRDSEPTTSILTITSNVVYGKATGAMPDGRKAGEPLSPGANPSYGAEQNGLLASLNSLTKLPYEWALDGISNTQTINPGALGNNEGERIDNLVNVMDGYFDQGAHHLNVNVFGKEKLIDAMEHPEKEEYANFTIRVSGYAVKFIDLTREQQLDVISRTCHERMMSEEKQHKRRVHYSGKYPKKFEEKYKELNPEKYKDTIEHVISKGNTPAGMHISIMVKEIIDFLDIKPGQTGFDATLGYGGHTRAMLEKLEGQGHMFATDVDPIESEKTKKRLAEAGFGEDILTIKLQNFCTIDEIAKEVGGFDFILADLGVSSMQIDNPERGFSFKVDGPLDLRLNPNVGISAAERLDNISREELSGMLYENSDEPYCEELAKAITDEIRKGNRIDTTTKLRHIIEQTLDFLPEKDKKDIIKKTCQRTFQALRIDVNHEFEVLYEFMEKLPGALKPGGRAAILTFHSGEDKLVKKALKAGYKAGIYSDYSKDVIRPSAQECAQNGRARSTKMRWAVRAEMHKFRQKYIGDKAFYKRYLMLAIPMIIQNAITNLVSFLDNIMVGQLGTEQMSGVAIVNQLIFVYNLAVFGAVSAASIFGAQYFGKGNHKGHMYSFRFKLYAALLVTAIAMTLFITNGTGFISLYLTDTAGNGATEVALAYGKEYLEIVMIGLIPFAVTQAYATNIKETGQTFVPMVASFAAVGSNAVLDFLLIFGIGPIPKLGVAGAAIATVMSRYIETIIVVLWAHKNRDKNRYLEGAYRGIGMPFGEFKTIFIKGLPLMLNELFWAAGMTTVTQCYSVRGLSVIAGLNIATTITNLFNIVFIQLGACISIVVGQYLGAGELEKAKDADNKMIVFSVFCCSIMAAVMLLVGGFFPQIYNTTDEIKSLATSFIAVSAIIMPFCAFTHSSYFTLRSGGKTLVTFLFDSVFTWVIVVPVAFVLAKYTALGIVAVYFLVQATELIKVVIGYFMVKSDVWLVQMVMKIKTKLAISFCIIIFVPVVLTSIVLVGFNKIQLKAINKTYGMEDAGMLALTDTVQFLNKVTGRTYDELEKTSLIEPSKLLDSDYLTKINKKLEKKYSYLIVKSEGELIFNGGIDNDDILRKLPRISNKQSSSDVSSYMDSDDKVLIKQLNFCDSDGDEASLYIVTSTACVIPEVRTVLIEGAFALVFILLTTAAMLIVWIYRSIITPIERLRIAAENIKDGNLDFELETSPSDGEIGELCTAFEQMRARLKKNAEEKVTNESENRVLISNIAHDLKTPITAVKGYAEGILDGVANTPEKVDKYVRTIYNKANDMDKLINELTLYSKIDTNRIPYNFAKINVTDYFNDCVEEIGLDLEAKNIRLSYENHVDSNVLIIADPEQLRRVINNIVGNSVKYMNKTQSYINIRINDVGDFIQVEIEDNGRGIDQRDMPYIFDRFYRADASRNSATGGSGIGLSIVKKIIEDHGGKIWATSKEGDGTTMFFVIRKYQETQDMNRQMSRILIVEDEVAIADLEKDYLELSGFEVEVENDGTSGLARALAEDFDLFILDLMLPGIDGFEICKRIREKKNTPILMVSAKKDDIDKIRGLGLGADDYVTKPFSPSELVARVKAHLARYERLIGSATHENDIVEIRGIKIDKTARRVWVNGEEKQFTTKEFDLLTFLAENPNHVFTKEELFKEIWNMDSVGDIATVTVHIKKIREKIEMNTAKPQYIETIWGVGYRFKLMEKLLFTSESVTEGHPDKLCDAVSDAILDACMEQDPMSRVACETASCTGFILVTGEITTKAQLDIPAIVRKTALEIGYDDGKKGLDGNSCAVMVSIDKQSADIAMGVDKALEAKEGDLTDDLDTGAGDQGMMFGYATNETEEYMPYPIALAHKLAFQLTKVRKDGTLTYLRPDGKTQVSVEYDEAGKPVRLEAVVLSTQHDEDVTQEQIHEDIKKYVFDPILPKDMIDAETKFFINPTGRFVIGGPHGDAGLTGRKIIVDTYGGYARHGGGAFSGKDCTKVDRSAAYAARYVAKNLVAAGFADRCEIQLSYAIGVAQPTSIMVDTFGTGKLADDRIVEIVRENFDLRPAGIIKMLDLRRPIYRQTAAYGHFGRTDIKLPWEALDKVNDLKKYLMEQYVIKGGNPLYGEVEIGGAKNAALAILAAAIMTDETVTIDNLPNVRDINVLLQAIEEIGAHVERVDIHKVKINGSFIRGVNVDNEFIRRIRASYYLIGALLGKYKHAEVALPGGCDIGSRPIDLHMKGFRSMGADIDIAHGLVIARAKELKGTHIYMDKVSVGATINIMMAAAMADGKTVIENAAKEPHVVDVANFLNSMGANIRGAGTDVIRIVGVEKLHATEYSVIPDQIEAGTFMFAVAATGGNVLVKDVIPKHLEATTAKLLEVGCQVEEFDDSVRVISDGHLKHTQVTTLPYPGFPTDMQPQMAVLLGIAEGTSTVTESIFENRFKYVDELTRMGADIKVESNIAIISGVKRYTGARVNAPDLRAGAALVIAGLAADGITVVDDIYYIQRGYEALEEKLTKIGAKIARVEDEKELQKFILKVSMEQKTNIVLIGMPGVGKSTIGVILAKVLGYSFLDADLLIQEQEGKLLREIIEEKGTDGFIEVENRVNASIRADRAIIATGGSVVYGKEAMEHLKEIGRVVYLKVSYAILEKRLADIKGRGVVLKKGQTLETLFEERSKLYEQYADIEVSEEGLDVEQTVEKLVEALELMKAKKVIAMLLAATLSVTAFTGCAINKTATVATLDKEDIKLGLVNFMIRYQEAGYDDMYIQYMGEGYWDKTVSGNNTVLETWKKNAIEEAHELYTLKAHQSDYDVEVSDDEKKEIKKAAEKFMKANSDDVIDEMSATEEIVEEYLELRLIKSKMYAAIIKNADSSVTDEEANMAAYTIVKLDYKGAYDSNYQYQTYTDEQSAQIKAQADAVVEALAGGSSLEDAAKAAGTTATTGTYATYIDPDAEKTDDSDKKSDDTESTESISDTESKESSESSNSKTKDSVYTTNNLDQSVVDALNSLEEGQTSDLITTDSTYYIVRLDKKTDEEATESNRKTVKGNKEDKYYNGILSGWQDDEKWSVKQKQLDKIKIHNYFTTTKKDKKAADTSATESTQQSESTNSTDTENTEAVDGTENMKAFTEPLLSLAGFEEMTKTAEKSSGLISVTGCIDAQKSQMIYAFGGHRKNKLIVTFGEQKAKELYDEYSFFDKEVVYYPSKDVLFYQSDIRGNLLTAERIRALKAIREQERVTLVTTFDALMNTMAPIEKMWENVLTLEQGQLLDLKEIQAALIRMGYEKEYQVQTMGQFSVRGGILDVFPLTEENPIRIELWGDEIDTIRYFDCESQKSIENTDRVSIYPAAELVLSDEEKAGGIDKLKAEAKRVADKLRKQMKTEEAHRVTVMADELTEEWGELSMYAGMDAFLSYFFDERVGLLDYFKPSDSLIFFDELTRCAEQGKLTETEFSESMKQRLAMGYILPGQMNGLFTEKEIVAKLGKYSCIALAALDNKANGLHQLGSYGIHCQSVSPYNNSFELLIKDLKRYKKNGYRVILLSGSRTRAKRLSEDITDQGITCFYTENYDHELFEGQIMVCYGKVRRGFEYPILKFAVITESDIFGAQQKKKKRHRTYEGEKIQSFTDLSVGDYVVHENHGLGIYRGIEKLEVDKKVKDYIKIEYQGGSNLYILATQLDMIQKYAGKDARKPKLNKLGGQEWTRTKNRVRGAVKQIAGDLVKLYAQREQQNGYAFGEDTVWQREFEELFPFDETEDQILAIEATKTDMQSHKIMDRLICGDVGYGKTEVAIRAAFKAVQDSKQVAYLAPTTILAQQIYDTFSQRMKDFPVNVDLMCRFRSAAEQKKTIEKLKKGEVDIIIGTHRILSKDVQFKDLGLLVIDEEQRFGVTHKEKIKQMKVNVDVLTLTATPIPRTLHMSLIGIRDMSVLEEPPMDRVPIQTYVMEYNDELVREAINRELARNGQVYYVYNKVRDIAEVAAKLQELVPDATVAFAHGQMKETELERIMYRFINGEIDVLVSTTIIETGLDISNVNTMIIHDADNMGLSQLYQLRGRVGRSNRTAYAFLMYRRNKMLKEVAEKRLAAIKEYSDLGSGFKIAMRDLEIRGAGNLLGAEQSGHMEAVGYDLYCKMLSEAVKEAKGIEDISDKFDTIVDIVTDAYIPAGYIANEFQKLDIYKRIAGIETEEEKDEMLEELIDRFGEPPKSVLSLLRVARLKALAHAVYITEIKQTGSLIKLTMFERAKINAEKIPELIAQYKSSLKFNMAENPYFTFDLKNGSVAKKRDVLDVVEELISQMRKELITAEMYVIVGLGNPDKKYEHTRHNIGFDVIDALADKYNISVTDKKHKALCGSGVIDGMKVLLVKPQTYMNLSGESVAEVMNFYKLDPDEEMIVIFDDISLEPGRIRIRKKGSAGGHNGIKSIIAMTGTQGFSRIKVGVGEKPQGWDLADHVLGRFSSEDRAKVEEAIGHAMDAAVLMMHGETDKAMNIYNMKEDRQTDMYKTKIDNLDLKQIADSGQCFRWKNTGENEYTVVAFDRALRIKQDGNEFELDCDEADWNNIWKSYLDMDTDYAGIAKLIADGDDAHLKEAYAYGSGVRILRQDLWEMIVTFMISQNNNIKRITNSVDLLCRRCGHKIDGSAEGEELYTFPKPLEVPDEVFDDRSMGFGYRAPYLKEIYEYGANNPDWLDNLRKMSYDEAMESLLSRKGIGKKVANCICLFGLHHVDAFPIDTHVKQLLDKYYSDGFDFERYKGVAGIIQQYLFYFELMQITDIRIRKVEKEGKMKAVVSITIDDEFVVHDIKVIEGEKELFIAMPSRKANDGEYRDIAHPINSATREKIQNMILEKYKTEIENAMKAIGIILAGGNNNRMKELTAKRAVPALPVAGSFRAIDFSLSSMSNSHIQTVAILTQYNARSLNEHLSSSKWWNFGRKQGGLFLFTPTVTADNSDWYRGTADAMYQNIDFLKRRHEPYVIISSGDCVYKLDFNRVLDFHIEKKSDITVVCKDMMYNDDVSRFGVVRMDEESRITEFDEKPIEASSNTISTGIYVIRRRQLIELLEAAAEENRFDFVNDILVRYKNVKKIYGYKINSYWNNIADIDAYFKTNMDFLRPDVRSYFFREEPTICSKVDDLPPAKFNPGSDISNSLVSSGCIINGRVEDSVLFKQVFVGKNTTVKNCVILNDVYIDDNVHLENCIVESRGTISPNTYYCGEDGVRIVKEKNVRYVIMIKKEMIAMLLAGGQGSRLGVLTADVAKPAVSFGGKYRIIDFPLSNCINSGIDTVGVLTQYQPLRLNSHIGIGIPWDLDRNNGGVAILPPYEKSGNSEWYTGTANAIYQNMRYIDSYNPDYVLILSGDHIYKMDYEVMLDFHKENNADVTIATMPVPIEEASRFGIVIADDDKRINAFEEKPVHPRSNLASMGIYIFSWPVLKEALLALKNQENCDFGKHVIPYCFENDRRMFAYEFNGYWKDVGTLGSYWEANMELVDIIPEFNLYEEYWKIYTRNDAIEPLYIAKGGHVERSIMGEGCECYGHVEHSVIGANVKIGRGAVIRDSIIMRDTEIGSNVTIDKSIIAENCKVGDNVTLGFGQEKPNVLNESIYSFGLVTIGEDSVIPDGVKIGKNTAISGVTYEEDYKDGVLEGGEVIIKAGDGKMAVTAIYAAATIIYMETIVIYYRSITDTVITETSGGYRMGTTKIRTDEEMYKIDFSKPIHIHFIGIGGISMSGLAEILHEEGFTISGSDSKESDLTKTLAAKGIKVIYGQSADNITSDIDLVVYTAAIHESNPEFAAAKAAGIPMLTRAELLGQIMDNYDYSIAVAGTHGKTTTTSMISEILLAAQTDPTISVGGILSSIHGNLRVGDSEYFISEACEYTNSFLNFRPRYSIILNIEAEHLDFFKDINDIRHSFREYASNTLAGGATIINGEIDRYEEIVAGLPQKIITYGFDSKYDFYPENITYDDKACASFTAMRQGSPLFDVKLSVPGAHNVSNALAAIALSTTLGLDEESILTGLDKFGGADRRFQYKGKVNGVTIIDDYAHHPTEIRATLTAAQKYPHDRLVLCFQPHTYSRTKAFLNDFADVLSMADVVVLADIYAAREQNTYGISSKDILDLLLEKGVNAHYFPSFEEIEKFLSENCVNGDLLITMGAGNVVEIGEDLLKKMTAINISSDIATSFTTVSDIFIDQYMPKANGEFVKVYLYLLRATGSGAGIATISEIADHFSNTEADIIRALNYWASEGILQLQSGADGQIMGINLCSLSVSGMQAAQSNIQSAVADNAAQNNLQNSVVNNTTQNNLQNGVVNNAAQNISTADIRMQDSVVEKLKSQTPDKPASSQKEYTLDEIKEFRKNPDISELFFIIETYLKHTLSSTDTNIVLYWLDELHFSTDLVEYLVEYCITKGHSSLRYMNKVALGWADAGIKTVDQAKDDAAAHSQIYYSVMKALGITGRNLVDSEVSLINKWVGEYGFDIELVKAACSKTISAIQKPSFEYTDSILANWRKKDVHTLKDVEVLDANFAKANKASATGSSQSTNAANGSSKPKSNNSSSKNKFNNFNQRNNDYDKLEKLFLNSTVMALTNAQYDEIMRGYDKRQLQNKYIHDKRIEEAYRKAPRLREIDSEIASASVRQAYRLMDGDENALAALRLAIDDYKEERAALLSTLGYPLDYFEPIYTCPDCHDTGYINGQKCHCFKQAIINTVYSQSNIREILSRENFSTLSFDYYSDEQKNPATGLSALATAKLAVTNCHDFIDNFENKPKNIFFYGNTGVGKTFLSNCIAKELLDAGYSVIYFTAFQLFDILSKGVFEKDADAIAAHQNIFDCDLLIIDDLGTELSNSFTTSQLFLCVNERILRRKSTIISTNLNLEQIAEIYSERTLSRISSNYSFIKLFGDDIRIKKRLSKMPNDERILETMPTGTLGLVATDSCIGLAQKVDAYLQGWREHREHQHANESAFKDYYKNSYIIKPSTPRFGSGEAKCVINQSVRGYDLYIMVDVTNYSLTYTVCGQTNHMSPDDHYADLKRVIAAAGGKARRITVIMPFLYESRQHRRTGRESLDCPLALQELINMGVDNIITFDAHDPRVVNAIPLNGFENVMPSYQFIKGILKNVKDITIDADHLMIISPDEGATNRAIYLANVLGVDMGMFYKRRDYSRIVDGRNPIVAHEFLGTNVEGKDVLIIDDMISSGESMIDTARELKKRKANRIFVVSTFGLFTNGFASFDKAYEEGLIYRVVTTNLIYQSPELLSKEYYISCDMSKYIAYLIDTLNHDCSISDLLSPYDRIKKCVQKYNDEQAAAKNKMEEIKMAKYRKLSRTSSQRKALLRGQVTQLLVNGKIVTTEAKAKEVRKIAEGLIALAVKEKDNFEEVTVTAKVARKDKDGKRVKEVVDGKKVTVYDEVEKKIKKDSASRLHARRQMLKVLYTAKESDGTKKGTKTIDVTNKLFDEIAPKYADRNGGYTRIVKIGQRKGDGALEVLLELVMPYFKKQMLKSVATHVSDTVTLFGLTDPAAMSFVTHKHKYDIMFDFEKPKIEIAEISEDKTYGRFVVEPLERGYGTTLGNSLRRIMLSSLPGAAVSQVKIDGVLHEFSSIPGVKEDVTEIIMNIKNVAIRNNSSTNEPKVAYIEFEGEGVVTAADIQVDSDIEILNPELEIAHLNGGADSKLYMELTITNGRGYVGAEKNKNEDTPIGVLAVDSIYTPVERVNLTVENTRVGQVTDYDKLTLDVFTNGALEPDEAVSLAAKVLSEHLNLFIDLSEAAQQVDVMVEKENDAQEKVLEMNIDELELSVRSYNCLKRAGINTVAELINRTPEDMMKVRNLGRKSLEEVLAKLKELGLELNQTEEMAVNKVPVLKRCRSLGLEPSYLGYDKKSRRNLTRANRKVSEYGLQLREKQKAKFIYGVLEKPFRNYYKKADQMKGLTGLNLMTILESRLDNVIFRLGFARTRKEARQIVDHKFVTVNGKVVNIPSYLVKAGDVIEIKESKKNTQRMKDIVEVAGGRIVPEWLDVDAEKLQGTVKDLPTREQIDVPVDEMLIVELYSKMAKNVAKKTTKKRVKKNVERGQAHIQASFNNTIVTLTDAEGNALSWASAGGLGFRGSKKSTPYAAQMAAETATKAALIHGLKTVDVFVKGPGSGREAAIRALSACGLEVTSIRDVTPVPHNGCRPPKRRRVMARIAGVDLPREKRVEIGLTYIYGIGRVSADRILEAANVDPSTRVRDLTDDEVKRISAVIDETMTVEGDLRREIALNIKRLQEIGCYRGIRHRKGLPVRGQKTKTNARTRKGPKRTVANKKKMEQNANMGTHMATHISGRATVAVDAYVFRRAYIKLQMYRYYSKMKVRSSVKPICEKCKVIKRKGSIRIICENPKHKQRQGMSKADVIEVEGVVVEKLPNAFFKVELENGHQILATISGKLRMNFIRILPGDKVTIEMSPYDLTKGRIIWRDKMSVTIKSEHEIELMREAGRILAAVHQQLGKEIKPGMSTKDVDRLGEEMIRSYGCEPSFLGYCGYPASICVSVNEEVVHGIPTDERILQEGDIVSLDAGVIYKGYHSDAARTVGVGEISEEARLLIERTRLSFFAGIKNAVAGNRLYDISGAIQQLAESFGYGVVYDLVGHGIGSHLHEDPEVPNFRPQGFRKGLRLKPGMTLAVEPMINAGSPHVVWMDDEWTVVTEDLSLSAHYENTILITKGKPEILSLTEDEKAAGFLELIMKIIMLGAPGAGKGTQAKQIAAKYSIPHISTGDIFRANIKNGTELGKKAKTYMDQGALVPDELTCDLVMDRIQQDDCKNGFVLDGFPRTIPQAKALDDALTKIGEKMDYAIDVDVPDENIVNRMGGRRACLNCGATYHIVFNPTKVEGKCDACGADTVLRDDDKPETVQKRLAVYHEQTQPLIEYYDKQGILKSVDGTKPMDEVFSAIVGILGEMLKTLRNAFKIKDVRNRILFTFMMLIVIRIGSELPIPGVKGSVFQSWLNSKSADGLGFVDAITGGSFSQMSVFALNITPYITSSIIMQLLTIAIPKLEEMQRDGEDGRKKIVEITRYLTIGLGLLESVMMVIGFYRQNYLTEKTPLTVIMVVTSLTAGSAVLMWIGERITEKGVGNGISIVLTINIISRIPEDLSTLWSQFIASAANVPKAIVAGLIVVAIIAAMVVFVVLLQDAQRKIPVQYSSKIRGNKQMGGQQTCIPLKVNTSGVIPVIFAQSLMQTPVIIASFLGKGNGNGIGSKILKGLSQSNWCDPKEPVYSIGLIVYIVLIIAFAYFYTNITFNPLEIANNMKRSGGFIPGIRPGKPTSDYLNQILNYIVFIGAIGLAFIAFVPIFFNGVFNADVSFGGTSIIIIVGVVIETLKQIESQMRVRYYKGFLDDMDLSNLKAAEGSVHSDNFRRGRGHGSGNGKTAGKGHKGQKARSGAPRPGFEGGQMPLYRRLPKRGFKNRNTLTIVPINLSALERFDNDAVVSVETLIEAGIVKNPRDGVKILGNGELTKKLTVQANAFSASAKEKIEALGGKAEVIMADRVKVTLIKSTIGAVPKNKKTIEALGLTKLGKTVELPNNAATQGAVRKVAPYVKVEEVMKREIIDASQLELVDQVVDIKRVTKVVKGGRNMRFTALVVVGDKNGHVGAGLGKAAEIPEAIRKGKEDAIKSMVNVKLDENNSITHDVTGKYTGASVLLKKSPEGTGIIAGGPARSVCEIAGIQNIRTKSLGSNNKQNVVLATIEALKQLRSPEDVAKLRGKSVEEILGMVSKKSRTEVRVKKHNRMRNHLAGTAQRPRLAVFRSNNHMYAQIIDDTVGNTLVSASTLDKDIKAELEKTNNVDAAAKLGTVIAKKALDKGISTVVFDRGGFIYAGKVKALAEAAREAGLDFMSRIGRMPIAVPAGVTVEIAENNHVTVKGPKGTLERTLPSEMDIKLEGEEVVVTRPNDLKKMKSLHGLTRTLIHNMVVGVTEGYTKTLEVNGVGYRASKAGKKLTLNLGYSHPVEMEDPEGLESEVQDNKIIIKGIDKEKVGQYAAEIRDKRRPEPYKGKGIKYADEVIRRKVGKTGKKMMMTSDPIADMLTRIRNANTAKHDTVDIPASKIKVAIAGILVDEGFIEKYDIVEDGKIKTIHVTLKYGADKNEKVITGIKRISKPGLRVYAGKDEIPSVLGGLGIAILSTNQGIVTDKEARKLQVGGEVLAFVWMNTSAYALCELSARAFSELSEENFLSATAVFINNYINKHIMAKTSMKIKQQRAPKFSTRAYTRCRICGRPHSVLKKYGICRVCFRELAYKGQIPGVKKASWMSRLREQYENEIKDAMIKKFGYKNAMEIPKLDKIVVNMGVGEAKENAKVLEAAVKDMEAITGQKAVTTKAKNAIANFKIREGMPIGCKVTLRGEKMYEFADRLINLALPRVRDFRGVNPNAFDGRGNYALGIKEQIIFPEIEYDKVDKVRGMDIIFVTTAKTDEEARELLAQFNMPFAKMATMKIKKGDLVKVIAGKDINNEGKVIAVNAKNNTLLVEGINMVTKHTKPSMSNQQGGIVHQEAPIDASNVMLIHDGKPTRVGFKMDGDKKVRFAKSTGKVIDMVQQESRLKVADNTGAKELLVIRVMGGSTRRYANIGDVIVATVKDATPGGVVKKGDVVKAVVVRSVKGARRKDGSYIKFDENAAVIIKDDKTPKGTRIFGPVARELREKQFMKIVSLAPEVLMEERNLRKTRVGVVVSDKMDKTIVVAVRDNVRHPLYNKIVKKTYKLKAHDEKNDAKIGDTVRVMETRPLSKDKRWRLVEIMERAKMKTSAYVKELQAQSVEQLQAQLVDAKKELFNLRFQNATNQLDNTARIKEVRKNIARIQTVITAKAAEMLMPKRVKHRKQFRGSMAGKATRGNKITNGEYGIVALEPCWIKANQIEAARVAMTRYIKRGGKVWIKIFPEKPVTHKPMGVRMGKGKGALEYWVAVVKPGRVLFEISGVPEDVAKEALRLATHKLPCKCKVVSRADLEGGESNENMGQKVNPHGLRVGVIKDWDSKWYAEGDFADYLVEDYNIRTFLKKKLYAAGVSKIEIERASDRVKVIIYTAKPGVVIGKGGAEIEKIKAEVQKLTDKKLVVDIKEVKRPDKDAQLVAENIALQLENRVSFRRAMKSCMGRAMKAGVKGIKTTCSGRLGGADMARTETYNDGTTPLQTIRADIDYGFAEADTTYGKVGVKVWIYKGEVLPTKANKEGGAKMAKGHRSKIKRERNEVRDTRPSAKLSYARVSVQKACFVLDAIRGKSVNEALAIVTYNPRYASSLVKKLLESAIANAENNYPEKNYKAENLYVAECFANKGPTMKRIHPRAQGRAYRIEKRMSHITIVLDERMARSLKKGPFADESLLKKVDAMNASGDKSVIKTWSRRSTIFPSFVGHTIAVHDGRKHVPVYVTEDMVGHKLGEFVATRTYRGHGKDEKKSGVRMGIKTYNPYTPSRRNMTGSDFSEITKTTPEKSLVTSLKKNAGRNNQGKITVRHQGGGNRRKYRLIDFKRNKKDGIPATVIGIEYDPNRTANIALICYADGEKSYILAPAGLTDGMKVMSGAQAEVRVGNCLPLENIPVGTQIHNIELLPGKGGQLVRSAGLSAQLMAKEGKYATLRLPSGEMRMVPIQCRATIGVIGNGDHNLVNIGKAGRKRHMGVRPTVRGSVMNPNDHPHGGGEGKAPVGRPGPCTPWGKPALGLKTRKKNKQSNKMIVRRRDGRAIKMANVQYYDVILKPVVTEKSMNAMAEKKYTFLVHPDANKTMIKEAVERMFEGTKVAKVNTMNCEGKNKRRGMVTGKTAKTKKAIVQLTADSKDIEIFAGLMANVAVYNMEGKEVDKIELNDSIFGVEINEHLVHMAVLQQLANKRQGTQKAKTRSEVRGGGRKPWRQKGTGHARQGSTRSPQWTGGGVVFAPTPRDYSFKLNKKEKRAALKSALTSRVVENKFVVVDELKLDEIKTKKFVEVLKNLNVEKALVVLNDMDEKVIASAANIPTVKTTQTNELNVFDVLKYDTVVVTKAAVATIEEVYAMKKAILATKIGMTQIFNADGVLVPVTVLEAGPCVVTQIKTVENDGYSAVQVGFGDKKEKVVEKDANGKKSVAHRHGVNKAQMGHFKKAGVSGKRFVREFKFENADEYNLADEIKADIFAEGDKVDVTAISKGKGFQGAIKRLGQHRGPMAHGSKFHRHQGSNGACSSPSKVFKGKGMPGHMGSVKVTTQNLEVVRVDADKNLLLIKGAVPGAKKALITVKETTKSGKMASQVMRITLKAYDHELVDSSAKKIIETVKKNGSQVSGPVPLPTKKEVVTILRATHKYKDSREQFEQRTHKRLIDIINPTQKTTESLSRIEMPAGVYIDIKMKQKMWLADRWKDYEVIDCSCGEKLERWSKYILLRPDPQVIWDTPKTNKNWKKLNGHYHRSKKGGGEWEFFDLPQEWTINYSLPINKELTFHLKPFSFKHTGLFPEQATNWDWFSKKIYDAKKSGRDVKVLNLFAYTGGATLAAAAAGAAVTHVDASKGMVTWAKENAVSSGLGDAPIRWLVDDCVKFVEREIRRGNHYDAIIMDPPSYGRGPKGEIWKIEESVYPLVQLCAKLLTDKPLFFLINSYTTGLQPAVLTYMISTALKKFDGKVTASEIGLPVSSNGLVLPCGASGRFESICMVKFYRTDDKLIHELDTLQGGTWIQMVNPSVAEGQMVADDLNVDIEDVLAALDEEESSRIELQDGYTLILVDIPSIETRHDKESYTTIPLGIILTDDEIVTVCTEDTPVLQVFLNNRVKEFSTKKKMRFVYQILYRISVLYQNDLRIIDKMRTEIEERVGEDTEEDDLIALHELESTLVYFATSLRANGVVLERLTRYKRLEQYPEDKELLGDVIVENKQAIEMTGIYRDIINGTRELMSTVIDNRLNNVMKSLTIITLIMAIPTVISGIYGMNVSSKWVPLATTAHGFMIIIGVMVVICVLILILLKKKRILMEKIILTGDRPTGRLHIGHYVGSLRRRVELQNSGEYDKIFIMIADAQALTDNFDNPEKIRQNIIEVALDYLSAGLDPAKSTLFVQSQIPELTELTFFYSNLVTVSRLQRNPTVKNEIKLRNFEASIPVGFFNYPISQAADITAFKATTVPVGEDQLPMIEQTREIVRKFNSIYDEVLVEPDVLLPENEACCRLPGTDGGQKMSKSLGNCIYLADTEADVKKKIMSMYTDPTHIQISDPGHVEGNTVFTYLDAFSKPGHFEEYLPEYANLQELKDHYTRGGLGDVKIKKFLNNIMQEELSPIRARRAEYEKDIPAVYEILRKGSETARETAAQTMAEVKRAMRINYFEDAELIKSQSQKYAEKMGKKEAKTNAIRILETMKIPYEARTYECDDFVDAAQIADKLGLDHAGMYKTITTVGKSGGYYVFVVPIDDEIDFKKAAKAAGEKSIEMLHLKDLTKVTGYIRGGCTSIGMKKQYPTFIHEAAKEQDKITVSGGRLGLQITLSPDDLCRAAKAEYADIIKMHRERVLKALAGLLVGVEKKLHLADRRRRREDKLIERARLLEIQRAQNKTNLKDADANGKISYRIGAYMQMKKLEEVYTNRELSWLQFNERVLNEAGNPRVPLAERLTFASIYQTNLDEFFMVRVGSLMMQMNSKEKIFENKTKMSSEEQVSAILDRVCELEKKKARIYEQLMGELEPKGVRIINFNKLSKDEGDLLEAYFDAHIAPFLSPMIIGKQQPFPFLANKQLYAVVLLTTQKGKKKTGIVPCSNSVFKRLIEIPTRPGTFMLSEELILHFVSKLYPKYVIREKSIMRVTRNADIDAQSMYDEDMDYRNMMEELIKKRVRLDPVRVELSRKINRKAIDELSSFLEIGKKHFISVKTPLDMSFVFQLQHYLRDKQELFFEKRTPRDTPELSLKESILGQVEKKDVLLSYPFESMKPFIKMLNDAAEDPDVVSIKMTLYRVADKSQIIDALIEAAENGKEVIVLVELRARFDEANNIEMSHRLEDAGCQILYGLGDYKVHSKLCLITKKKGDGFEYITQIGTGNYNEKTSRLYTDLSLITANQEIGADASRVFMALQRGETVSDGDVKHLLVAPKCLQNKIVDMIDEQIANKNAGKPAYIGVKINSLTDKVLIDKLIDASQAGVKVELIVRGICCVKPQVEGATENITVISVVGRYLEHSRIYRFGVGDDEKIYIASADFMTRNTVRRVEVATPVYDANAKDKIRHIFDTIMTDDEKGKELCADGEYMDRKINSTPIDSQEQFFEEAYKNADKSADNMQLAAKETLRCADIVEEMFVNLHECIDKKGKNIENELKSARTLQKHYVLCGIARIGILSDDINGEVNIAMLKKKLPKKAVVIGMMATMITGCSQEVQTTNVDGLNSYKNASKRWMINTEGTKVWAHRGASGYAPENTLEAFKKAEKMKADGVELDVQLTKDGELVVIHDETVDRVSGEKGFVKDYTLKELKRLNVSKHMPSYDKKTRIPTLDEVFDLLKNTEMTINIELKNGIVQYKNLEKKVLALVEEYDMLDRIWCSSFNHESIVRMKKLCPDMRCGLLFSDIIVNPAEYASELHVDALHPATYHMQDENYIDKAHGRGLRAHVWTVNEKHEMKALVKAEADAIITNYPDIAVEIVKNAMKAKENNTQKKTKKLSSKELSWVLYDVGNSAYTLLACALIPIWYKSLAVGDGAGQISSDRATAYYAVAIAVMTVVSALIGPVCGAIADHMRIKKAIFSTTVVVGVSACILNGFTPTWVLFLVIYVLTKIFYNASLVFYDSMLVDVTTKDRMDEVSSYGYAWGYLGSCVPFLVSLAAYICGPDMLGYISNRLSMIIGFAVTGIWWFVVTIPLFKSYKQVNYVSDAADKDIHKNFENDVFIRDNIKEKSKTNKNPGVLRLIADAFAQIFGTIKKIATKDKKVGLFLVAFFLYIDGVGTIIDNCINIGTDLKLDSVGQVVFLLFTQIVACIGSLVFGRLSQTYKTTTLLYVCIAGYFAVCLYALTLHDLIGFGIMAFGVGCFQGSLQALSRSYFSKIIPPENSGEYFGIYDIFAKGASFLGSLVIAAVKLAGGTINVAVATMAIFFAVGFVFLRLADRYDAPRHENNMAYYIAEGAVVKGQVTMADGASVWYNATVRGDSEPIEIGRNSNIQDNAVVHVDLSHSVRIGDNVTIGHSAIVHGCTIGDNTLIGMGAIVLNGARIGKNCIIGAGALVTQGTDIPDGSLAFGSPAKVVRALTADEIEENHRNAMHYVEIARESLIMSQSKKIFTRMCLNNWGGINHKVLQFNEYVNLFSGKSGSGKSTVMDAIQVILYGSFSPTFLNKAADDAKNRRSVLSYLRGEQKDGSANRGDCDFCSVIALEIEDTGSHTFTCIGIAFEVRKNDSEIKRFVYFSHSGRMPEPSYVTADGFCYSNNDIKKLINTRSQSADRRARGDVNRIYASKEAYLGTLYDVILGYIDPNRFITMEKSAIALRMTNGTGQFIRDYMFPKSDSGTIETISEQLDAYRQIREKIEDMRKRIELLKEIKESGQELLNIQSDIVMAETMIRCIDIEDMRAKIQAAEDDKKRIEEEQDRLSEKADDIAGQQAAVQQEYIQVCADLKSSDLGSKKDQLRELEKRSLMLTDNSRQWIKITNGLKAWDEDEVITDYVSNAVLNLIEEIVDGDVTEAKCQELHLKLESIKKDIEDELEDNTSQKNEITKELKEKKRLVDDMKNNRKSYSESLRSARAALQRDLSDRFGEPVKVQVFADMFDVQDEEWKNAIEGRMGRLKFSLITEPRYAHTAAVIFRDMKQFEDVDLINSKAIMDSEPKAMDGSLYEAVDTKEKYVDVCLKRYLGHIIKCRSVDELEQVRDGVTPDCYSYSNFIFRHLKKRDYTTNACIGGRVSKARLAEYETDVERLEKDRIQLMGIISSLKAQRDFECLKGEPEYFVGLSEASDELKAVNSQKNELEEIIRTMENGQYKELKEKKRLLEKNIDALKSAFSLNQQQINEKISQHEKIIGANEQRRAQLDDMLQGYVAREELEKQVQDMLQHSSGASVKSKQREKLIELQGADGNGGRQQSCVETLQTARYRYIKEFPSGQFSGAEKSNKAYEELLEKYEKDYEPAYESEFEEQCKVIYKSLRENVIGTIHGDIKAAKRHAYEINRLLRETNFSDSTYQIKIEPAKNENGQFYDMLMAEELDSKNPDNGGIAGQISFGEDDFYKKYEQKIKLLTDKFMPPRDEDEHLRMQKRKEMEQYADYRNYLSFSMYEQVTDENGRVIRENFVDDMAGRDSGGEGQNPKYVALLAGFAMLYMQQSNRDSKIKLVLLDEAFSKMDQERSAVCLKYARKMDLQLIVCVPDERLQSLIRNVDCVYGFRRHNNQISMMHIDKGDYLKLMEGMFEYMENVSPNEAENIRKTIQDLLRQTCILQMKCDPVTLIQRDNPRYQVCLRNREFIADYLAVLDCELVHDQQEHLFRIKGDGVILEKMTLLTARLVIIMKMIYRDKIMGEGLNATTTNLAEIREYGRNTNLITRKLTNQEWSDALLLMKTHQMIELPGAIANLEDNTPIYIYGTVNIFCSAMDINELVRMYSDEVELIKYDNESAATLEAAGLNTEGSSVNHTHEFAKNSEMEELPIESVMSMTLKDRIPKEFYSLFRTKNMDAYMQIVVALYEENNEVYASLGLTREECQIIIADTISKTGIVWQTDYNEDESDKDSGSMDNHDDYNPDSEIDVIYDQATFAYTLTPSAILGRLINWGWIRSDFDEKLNTYVIAFPQYSQMYAELFKKLLVDDDSRERESILAVYSALFTYFSDPEKNNDILKNALYTSKNLGQLLSNMQDGMRAYFDELSRMKDFIGIQKVLIKEINNSDSRRYAILTTTDSFYRYKEAVKELISKILNQNDDRRAELEGILSQTTPGTFERKRYEYSVEYCDKASELVYKVEHEFDLIERKYNKLIEQKTIFAKRALARIHYILQEGADDEDNIVKLINLIDKSDKTDEILGALRNRMKFTRQFYNVTDDSFPGRRERGRSEFVPFVIDDASAGEDDMADFVPKPLYTKKELQSFRDKNMRDGMFVTDEQTVESMEDLEKLLFLWQEETNERMGEDTVSLDGEITKNDGVSYSRLVISKSDSKREVMVKHIILWTLKDEYTEAQKAEIRAGIKEGLEGLKGQIPGMIDISVRTDYLPTSTVDVMLDTTFEDADALAAYAKNPKHVAVADTKVRPFTANRACMDFEVMNFEKYNLFEECVAKMFSEEELVVSRQYRTEKNMEIDILLKRMKLNIVLRMEDVIRKYFQCWLDKDINDVKEIFSDDIIYSECYGPVYKGIGQIIRWFDDWNRKGTVLQWDIKRVIASGNTAVVEWYFECDYEGNVDGFDGVTIAEFDADMKICDLKEFQSKAEHNYPYGEMLCKKCHTEMTVMQEDNVNGLICPKCGWNIVTTKIDDIMLDTQLYQLYILKNEHINRNQIRILSKISGMRSVFLWRKRLRGMKKRKILMLILLVSTVLLSGCGKTFLSRLFKSEHEEYAEILTAFLAAANQNDTKKIEELFAPNIRGKEFQKEVDDFLEFYNKTAKDGTWDKDDILLGVTGSQDRDLYRVMHSSIELKKDNKNYYIYMEVVTADKENSENKGIQIIDLATKKAYDDRYFLWHSKQGIYAQEKACEDYQSMLIYGNVREYYTVDRELSVDYFKNFLKRSTSYKELQNEIGEPNGELINDEFVYEITQGANEKTYITCEVLGDEIIKLEVCNEEKVIETIYEKNSEENMGKRIISVLLIVGICLSVTACSPVENLFDIMNRVTDNDNPLSGKSTDERIVMSLEDTYPEHTFSAINSFDNDKGEGFFSDEKGIKFRVHNLIYNNTYHFGCEDDYLATILNEQNYISQASDIATKYGYALAYDEENEIVSIQYAEDFQQTDDFSYYSKMVYEILNVVETPTVVDPDTEFSTGEVNYYSRPCMGTLLCDITYHTSKTSVRISFEDKDLSEEQIQAKFKEEYQWLKETQEMVKAAKSYQQKYEKIMGESSEDELWSDIERDIAEFKKKVEFGKADGYFWNMYYNLLRSNRLMFAGINKAFITGDMAYMLNGIYQENRFNCIYGNRANSGGAQTINFIEVVIAYSCNDYKLLEKIMPFEAGPASYSYSAPYYNMVYAMTYHDDEVGKKAQAELSTFMEKKRTQFDLKLAKFFYDLYQKDVDGVNCGLQELCDLMGKCKWINEHIYGLDKDIQTLGKMVAIFIHGLYHIAMKFLEDSPLLDKIKMPEHKSFIKEYEEFNIEKNFPEPHNLINFDPIAKFINLSIKTEMIPEVSFSKSGRMYVNDGKRFEKNLFDNLQKSKALPFELKEEKYKVPAVYKEFICKYDGLSLENGCTFYSLEELDAMNKDLQVNIYQPDTVAVGDDGGDLVFLMKQEKEAKTVYLVDAGDYDLESPYRIIVDFNKWMEKGFEIEDIDGEDVRGVDYGDLYLIKMPKEGVKGLVTIKRAFNLEMSTGELLQKTKSLPTKLLSNITSSKANIIAEKIGMPGLFEIRMNSTLIFYIFFCIMLISSVIIIVTRWKRYTKYSNGTYINAGQNLIFKTEMSQSEIIQQLKTHNANDTLEYDFFEKNNEYFLEVKGIKRLFFNGILTATFKVEFWGNTQKYIIIHRCNNFQLLYSSGYEAEIFEFMVKKLNCVPQKSVKEIMAVGFKVGYYWFQVGTSDFLHSFFSTICIRLEHGKWGRVYPKLMGELYQGCLKNQDLNEGLEELRKVRKELKNFSPSDVIWDAEDLSLTPPWGNNISSDITDLSNYFVTSDGRDLISVLSEAMNEAKEMQCDIEIDNLMASRSFRVFGTRTDLESVFYEFQEPNLVKYYKCGRNENKIDDITKTIYFGISLNGSHIGNQYLVIKDDKSICFDKYKHISQYLNETSVAINLGGLYDENTIVPTTVSTIWYDNKISKEIFNDLRKIMKRYASTTINGYMILKNAYSKKEQLRFVTIGAQSPREYDLIVMNKHELYHNHNYVYLLTSNIINRCGDSLDTILFTWLVYLLTNSAGWSAIIFGINQATSVIIQPFIGPLVENMNKKKVLVLSDIARVLLVLYILYVYTQNMLSPLILVFMTISISLIEAFHMPAGVAVIQHVLPNEHYDKGVSVNVSCTKIAVLVGTGLSGIVISSFGIGISLAIDALIFLISALLIVKIEFSVQEEKKTNRIIGREYLISLRDGFSYVFDHKKLLKLCFLCILINSAVVPFDALLAPIAREMFSGDAKIVSLLSVSVTIGTILGSLTFAKMKEEKKNNTLVTFCGIVLGVYYVFIAFVSKYIANPITQKLLLLIGSIIIGAALGLMITYVQVKFVKEVTKEYIGRVSAIRFSLTYACAPVVSFVISIIYKVTVVDTSSLFVGFGIVIIILFLLANKITFSPLKKGDKSYMNKLTTAVWEITMGCNMRCKHCGSSCAEALPDELNTSEALEVCDQLKDLGLKVITLSGGEPTTRSDWHIIAKRLVDNGIITSIITNGWLIDENFIHNAITSGIRSVCLSIDGLEKTHDFIRRSGSFNKSIKALKELRKNNISTSVITSINKENICELEELYQLLIVLADCIGYYSNKDIKVNENFLNDNWSWTGCGAGKHVIGILHNGDIVACTSIRDKTLVAGNIREKSLKSIWESPDSFKWNRNFDSSKLKGFCRECRYTERCLGGCSNSRYCINGSFESENRYCAYNVEMKKWKKYLESLNDISEIDNVIEKAAALKHQDLYKIACEIKQSKLMFNLEELSLEFVKISELKTSKNLFGPVMYGTGVRMMPDVDNLLTSFYQLDDEARQEVVETIRLKLQYHRDPKRAEQIKQIKGWMAKAKFERTKPHCNIGTIGHVDHGKTTLTAAITAVLAARVAGNTATDFANIDKAPEERERGITISTAHVEYETEKRHYAHVDCPGHADYVKNMITGAAQMDGAILVVAATDGVMAQTKEHILLSRQVGVPYIIVFLNKCDMVDDPELIELVEMEVTEQLEEYGFNDCPIIQGSALKALEDPMGPWGDKIMELMDTVDSYIPDPQRDTDKPFLMPVEDVFTITGRGTVATGRVERGTLHLNDELEILGVKEDVQKTVVTGIEMFRKQLDEAQAGDNIGALLRGINRDQIVRGQVLAKPGTVTCHHKFTAQVYVLTKDEGGRHTPFFNNYRPQFYFRTTDVTGVCELPAGTEMCMPGDNVEMTIELIHPVAMEQGLTFAIREGGRTVGSGRVATVIEMAGREYPLERTRNIGIMAHIDAGKTTLTERILYYTGINYKIGDTHEGTATMDWMEQEQERGITITSAATTCHWTLEEFTKPKPGALEHRINIIDTPGHVDFTVEVERSLRVLDGAVGVFCAKGGVEPQSENVWRQADTYNVPRMAFINKMDILGANFYGAVDQIRTRLGKNAIVLQLPIGKEDDFKGIIDLFEMKAYIYNDEKGDDITVTDDLGDMADQAAEYRTELIEKICELDDDLMMQYLEGEEPSVEDMKKVLRKATCECTAVPVCCGSAYRNKGVQKLLDAIVEYMPAPTDIPSIKGTDLDGNEIERHSSDDEPFSALAFKIMADPFVGKLAFFRVYSGKCKAGSYVLNATKDKKERIGRILQMHANKRQELDEVYSGDIAAAVGFKFTTTGDTICDEQHPVILESMEFPEPVIELAIEPKTKAGQGKLGEALAKLAEEDPTFRAHTDQETGQTIIAGMGELHLEIIVDRLLREFKVEANVGAPQVAYKETFTKAVDQEYKYAKQSGGRGQYGHCKVRFEPMDANGEELFKFDSEVVGGAIPKEYIPSIGEGIEEATKAGSLGGFPVVGIHATVYDGSYHEVDSSEMAFHIAGSMCFKEAMAKAAPVLLEPIMKVEVTMPEEYMGDVIGDVNSRRGRIEGMDDLGGGKIVHAYVPLAEMFGYSTDLRSKTQGRGNYSMFFDRYEPVPKNVQDKVLANHAKMPRKGHTQKRDVLADPMYNSKVVTKLVNSIMLDGKKGVAQKIVYGAFATVEEKTGRPALEVFEEAMNNVMPALEVKARRIGGATYQVPIEVRPDRRQALGLRWLTAFSRARGEKTQAERLANEIMDAANNTGASVKRKEDMHKMAEANKAFAHYRFMPTFNQLVRKGRQTSVKKSTAPALQRSFNSLQKKPINTSSPQKRGVCTAVKTATPKKPNSALRKIARVRLSNGIEVTSYIPGEGHNLQEHSVVLIRGGRVKDLPGTRYHIIRGTLDTAGVANRKQARSKYGAKRPKAAKMFVLKLQKLLQTKKKEVRETGLLFCIILKTKLVLTKQTRICIIFMPETNNIENNQAMQFDAIQIGLASPEKIREWSHGEVKKPETINYRTLKPEKDGLFCEKIFGPTKDWECHCGKYKKIRYKGVVCDRCGVEITKSSVRRERMGHIELAAPVSHIWYFKGIPSRMGLILDLSPRVLERVLYFASYIVLDPGETKLAYKQILNESEYQEACDTYGRSAFRVGMGAESIHELLAAIDLEKDSAELKAELENATGQKRARIIKRLEVVEAFRESGNKPEWMIMTVIPVIPPDLRPMVQLDGGRFATSDLNDLYRRIINRNNRLRRLLDLGAPDIIVRNEKRMLQEAVDALIDNGRRGRPVTGPGNRALKSLSDMLKGKGGRFRQNLLGKRVDYSGRSVICVEPKLKIYQCGLPKEMAIELFKPFVMKELAANGTAHNIKSAKKMVERLQPEVWDVLEDVIKEHPVMLNRAPTLHRLGIQAFEPILVEGKAIKLHPLVCTAFNADFDGDQMAVHLPLTAEAQAECRFMLLSPNNLLKPSDGGLVAVPSQDMILGVYYLTMRKLADYKDDPKMVAQVSSDTVYNDIEELRKLTTPDENTGKAELGLYDLIWFEDVTDGNRRVLCRPIDLLGRYYGSVNLAMLAYENKEITLHQNIFVHRTVKLADGTKVSGFTETTVGLLIFNENIPQDLGFIDRSKAENALKFEVEFHVGKKQIKQILEKVINTHGATTTAEVLDNVKAMGYKYSTQAAMTVSISDMTVPPQKPQMIADAQDTVDKITRQYKRGLITDEERYKEVIETWKDTDDALTKALLTGLDKYNNIFMMADSGARGSDKQIKQLAGMRGLMADTTGRTIELPIKSCFREGLDVLEYFMSAHGARKGLSDTALRTADSGYLTRRLVDVSQHMIVRESDCCAGTGREIPGMVVKAFMEGREEIESLQERITGRFSCNTICDKDGNVIVKANHMITPKRAAKVMAEGVDENGNPITQVKIRTVLTCRSHMGVCAKCYGSNLATGQAVQVGEAIGIIAAQSIGEPGTQLTMRTFHTGGVAGGDITQGLPRVEEIFEARKPKGLAIITEFGGIATIKDTKKKREVIVTNNETGETKAYLIPYGSRIKVVDGQELEAGDELTEGSVNPHDILKIKGVRAVQDYMLREVQRVYRLQGVEINDKHVEVIVRQCLQKIRVEEPGDSDLLPGSMVDALDFLELNEKLEEEGKELAVGSQVLLGITKASLATNSFLSAASFQETTKVLTEAAIKGKVDPLIGMKENVIIGKLIPAGTGMKIYRNIKLDSDVNDDDTLDFDDDDFADFAEEEAVGVIDKDAESVDEEMEKNRIRPVTSGKSMRMSYSRQKEVLQMPNLIEVQKDSYQWFLDEGLKEAFADISPITDYSGKLSLDFVDFTLCEDDVKYTIPECKERDATYAAPLKVKVRLHNKETDEINEHEIFMGDLPLMTETGTFVINGAERVIVSQLVRSPGIYYGIAHDKLGKTLYSCTVIPNRGAWLEYETDSNDVFYVRVDRTRKVPITVLLRALGVGTNQAILDMFGDEPKIQASFSKDPAITEREPQGSYEAGLLELYKKIRPGEPLSVESAESLITAMFFDPRRYDLAKVGRYKFNKKLALKNRISGQVLAEDVVDPSTGEVIAEAGTVVDRALATQIQNAAVPALWIQTETRNVKILSSMMVDIRSWIPEIEDPKSIGVTELVYYPVLAQILEEYDSLEDRIEAIKRDISDLIPKHITKEDIFATINYNMHLEWGAGTDDDIDHLGNRRIRAVGELLQNQYRIGLSRLERVVRERMTTQDLEGISPQSLINIKPVTAAVKEFFGSSQLSQFMDQNNPLGELTHKRRLSALGPGGLSRDRAGFEVRDVHYTHYGRMCPVETPEGPNIGLINSLACYARINEYGFVEAPYRKIDKTDPKNPVVTEEVVYMTADEEDNYHVAQANEKLDAEGHFIRNSVSGRYREETQEYDKSAFDYMDVSPKMVFSVATALIPFLQNDDPTRALMGSNMQRQAVPLLTTEAPVVGTGIETKAAVDSGVCVVAKADGEVLSSESNRIIIKETDGNKREYILTKFSRSNQSNCYNQRPIVFKGDKVKAGDVIADGPSTSQGELALGKNPLIGFMTWEGYNYEDAVLLSERLVEYDVYTSVHIEEYEVESRDTKLGPEEITRDVPGVGDDALKDLDERGIIRVGAEVRAGDILVGKVTPKGETELTAEERLLRAIFGEKAREVRDTSLKVPHGAYGIIVDAKVFTRENGDELSPGVNQSVRIYIAQKRKISVGDKMAGRHGNKGVVSRVLPVEDMPFLPNGRPLDIVLNPLGVPSRMNIGQVLEIHLSLAAKALGFNISTPVFDGANEVDIEDTLELANDYVNLPFDKEELEKDLQAEHPYWSADAEIFYDKYVDTLREDVMEYLSTNRAHRSLWKGVPISKDGKVQLRDGRTGECFDGKTTIGHMHYLKLHHLVDDKIHARSTGPYSLVTQQPLGGKAQFGGQRFGEMEVWALEAYGAAYTLQEILTMKSDDVVGRVKTYEAIIKGENIPEPGIPESFKVLLKELQALGLDVKVLDENREEVELIETSEYGNTDINSIIGNDKDYAFEDSESFAEHGFSKKEFDDNEELVDIEEEESPETADDDIFADEVLDDEEMRKYFEYFTKNKKTLAFVPDLLYSIRCTIVVQWHFYAIFMAKLTTAEFIDAIKELSVLELNDLVKACEEEFGVSAAAGVVVAAAGADGAAAEEKTEFDVELTEVGPNKVKVIKVVREITGLGLKEAKDAVDGAPKVIKEQLDKASAEDAKAKLEAEGAKVTLKMAKVELKQPIVDEISGVINGAQSVVVVDYLGLTVAEDTQLRKQLREAGVTYKVYKNTLVNRAIQGTEFEGLKDVLEGPSAFAVSTEDATAPARILAKFAKTAPALEIKAGVVEGTFYDAEGMKAISAVPSRDELLGKLLGSIQSPITNLARVLNQIAEQGGAADAAVEAAPAEDAAEEAPAAEMKRGKKYQDAVKAFDKKEQYDVADAISIVKKNATAKFDETIELHLRTGCDGRHAEQQIRGAVVLPHGTGKTVKVLVFAKGTKVDEAQAAGADFVGGEELIPKIQNEGWLDFDVVVATPDMMGVVGRLGRVLGPKGLMPNPKAGTVTMDVTKAVNDIKAGKIEYRLDKTNIIHVPVGKASFTDEQLNDNFQSLMGAINKAKPASLKGQYIKSATLTSTMGPGVKLNVVKITQMAKKVEGYIKLQIPAGKATPAPPVGPALGQHGVNIVEFTKQFNAKTADQGDLIIPVVITVYADRSFSFITKTPPAPVLIKKACKIQSGSGEPNKKKVAKITKAQVQEIAELKMPDLNAASLESAMSMIAGTARSMGVEVVDMTEANWYVVHTYSGYENKVKANIDKTIENRHLEDQILEVRVPLEDVTEVKNGVRKQVSKKMFPGYVLIHMIMNDDTWYVVRNTRGVTGFVGPGSKPVPLTEAEMRPLGIKTENVVVDFAEGDMIVVIGGVWKDTVGVITAMNYHKQTVTINVELFGRETPVEVSFADVKKTNMGQNEKVEKAPKTSWFSGLKAEFQKIIWPEKQSVIRQTVAVLAVSVVTGLIIALLDWGIQQGVDFLIGLHFMSRNIENHDSVLLLQDCIAGCKMALESMDDIREHTDDKQLRELIDKYYDEHTGLSVDCRDMLDKAGADIKEPGVFAKMAAKLQTAMKMAVNDDQSQAAKLLTEGCNMGIETISGSLNEYRDADSKSVAIAERLRTLEEKMVGDLQPLLMRDDLKRVKKKLSLTFAIAIIGTCVVFGLLYYLGIDLLNNYIEGTSHLIYDNEKPYIDEFQQYVSDNNISTTDVEQYDEWMSDHDISFYSVKEEGKVIYNKSNVDKLISPAKNMYDYRFTGSYELPVQFSDIKAEVFIYTGFTIKYYIALMIFDVGFSLMMGIVFVYLRIRKIIAGYQTELEASQEQEKKARQEKDELMRNMAHDLRTPLTGVMTYVDVMKLENEAYAENMKNLNFISEKVLDIRTQVDNLLDFSIAGSQRPIELDASMDVEYIFGDYLSDVCAQLMKSNYEVDAEGISFKQVKVAVNMAFLTRIFSNLTDNIYKYADNKKPVVMKTAFTKKIFSVEIGNGVCDNKTLLKSAGIGLKSVDAMMQRMNGSMSFKREHGKFWVKLEFPIVMDKILVVEDDKTVYSGIKKLLELQHYSVVIAQNGMEALEKIDESFSLVIMDIMMPQLDGIETCRRMRERHSVPILFLSAKSEELDKLEGLEVGGDDYMTKPFSNMELISKVKALIRRYRVYDSGSANRTNKDESIEADGLKLFTNRNKVEFNDNEIKLTGKEYEILKLLMKNPDRIYTIEMIYEMVWDEAFTYNAKNTVMVHIKNLRNKLIKACGDACIHTEWGRGYRFERMRNKWWQACKELLGRPGRNILIAICIFVLTLFCGIATFLDSAIESFYKSFADMAGCCVLVELDDFSTLDDWKDILEYADNNKNVVGYNNAFTSDIICEAVDFENVPYTEKQSDFEKNKIYVSGNINTSYNEYFSSGIFKISKGKYPMSGDKGAMISDKLASENNLSIGSNVSIQYENNTISIKVIGIYTAINTPKTQVSDGYYKEVANSIVFTDYNSYVELNNEASCYGINFFSSDYKSTSLLYDDMSKMFQNVPNSAVVNQVLNEELQMTDVISMLKSMTSVTLSVMYIVCVVVMSLLTVLWLKGHSKMIAIYNTLGQKKSRTIQILLYEILMITVPAIVGAGILTLGLLNRFSVNIFKYFVEFCEISNFQKSFSLDIWNFEMNIWQFVYRIGLLEISVILITMIGSCIYANKGLRTLRNNMLEMINVSYAYKSKKEIVHVLDKVTYRFEIGEMYGIFGPSGSGKTTCLSLLAGLEKPDEGEILLDGENIQNIGGRKLRQNSISLVFQDYQLFDYMTSLENVMVAAQISLPDVPKKELIKMCRDSLVMVGLDDSQITRKVTELSGGQQQRVAIARALITDAKYILADEPTGNLDKENRRKIVELLQQIAHEQDRCVIVVTHSDYVKKKCDICYEMGDDDEEMIETAIIYIKRNKIKSLIIILIIATIILGEIIGLLLSNASEKSERDAYLYNGAALVIEDDNGGFTKSDYDEIRKVKYVTGLGAWRELIADPVDTENVKEHKGIDPENKDVRNRADKMVIIANMDVQKYSLFSWEKNVSLIEGEFPTYENKGIIVEQRYAKKNNLKVGDEVKYTIGDQSEVTSLQICGIYKVDSDFEIYDSNEEGTSVYIHSPYNSIYVDYDYIVELLGLEYTASTGSEVYIDKIEHIDAVKTQLKKMYGDNVEIYDNTSNYLDSECKVVGLMGKTSKIICWMIIIMGEIILLIVFSFYTIQYQKDTGLFMVLGRSRKWCIGRFAFIGMIYAISGLLLGVLLYCVLGNFICSIISGIGKNVIINSTDRAIGGYDTPGIFQGFEVRIEMSAFFTLKNIIILLIISLVNWVAFMVLPVVTTVEENAKKLLNSKGMEKNRKQIIICAAIVACVCVISVLITYNILQQRNHLRVELYYGTFDFSEYQNVKSTNKLAIIHDNDEKQGEYEMEIENTDKVETGIWKWNDDGYITLYQDDKAVANLVYMNGKYLFFDADVEIQKLKRISETAIVKMNKKSVAKECINIILLLINIKIPSIVYDYYFKYSEGPYLQIAVIVEYSLTCIAWMILILYIIKVLNLKNKTGIDMYKGIAGSEGIGIGNVVIIEEHEIVIENKKITDTDAEIARLQGAIEKFVNDTNAMADRMEKTVGAKDADILRGHIQMLQDPTIEEQITALIVSEKITAEKALDQVLEQTAEIFAQIPDELLQQRATDFRDIKARILKILLGIEDYDISAAPAGTVLVAHDLTPSMTAGIVAENIAGILTEVGGRTSHSAILARAMEIPAVLSIDGICTSVKNGDRVVLNGTSGEAIVNPDAETEQKFAGLLEEYKKEKELLKKFAGVPTVSADGTKVELVCNIGKPEDAKKAVECDGEGIGLFRTEFLFMDRDTIPTEEEQFEAYKSVAETMKGKPVIIRTLDIGGDKEIPYLGLEKEDNPFLGYRAIRFCLQRTDIYNTQLRALVRASAFGRIKIMVPLVTGVDELRSVKAMVADIMKELDAEGIAYNKNLEIGIMMETPAACMMADVLAKEAAFFSIGTNDLTGYTMAVDRGNSKVAYLYSAFNPAVLRAIKRIIECGKKEGIMVGMCGEAAADPKLIPLLLAFGLDEFSVSATSVLKTRKTIADSSMAECKALADKVMACATEAEVQAVLAQQMVSKTMVVKAAEGLHMRPAGVIAREAGKFDSDVTIVFGDKRINAKSLVNIIAACIKKDAEITFECEGADEEAALAKMEELEADNFGDMLSEKGLLIIEKLAEHNNELVTSKALAASTGMSERSVKTYLKEVADFCEQNSMTLDRKPGKGMKPCFSDAQIGKILDVAGRKSAAVSQKKRQNYISYILLSGWDTYTYALFSEELNVSKNVIMDDINELDAELVLFGIKVHRTAGYGIYATGSELDIRKAMRHFCRYPISDKQVIKTDDHRLSRRAAEVIANNFRSVNLSMAVDMIHHVERRFDIIFTDYTFQMLAEYISIALFRVDVEKELKPDELDLSNRICDAASDGEAGTETEQQVQKNGFIMTEHENMAKEAAGFLERYHGISLSQPEIMYLAMLFSCAEGQNRIVMSCEEALSIEDEMIVYLSNLLAANLIENELLRESMRSFLPGSIARTHFGIEIDNPFLSDITQSYASLFTVCFTVSRYYEKYTGAMPSENEIAFIALQVGGALHRNPMTVRAVLIGAAGYATGSIIAGKIENRVPDVRIVSILSSDRIEHIDEYDCDLILSTIDTQADIHKDMRFLYVSPLISAQDEKNIRNKCFELMTGQSAEVSEFSQMLSEEFIIFEKKAKNRKDVLKRACQLLINKGIVQSEFARDVLEREKVEATAVGCNIAIPHGKPEHVNRCQILVIRLDKPIEWGERMADMIFLLAINFDSVNTTKAFFHDFTKLLNENGATDRLREAASPHELCAAIRKELGWNMSNNTTEKKAVVFDLDGTLLYTLEDLKNATNYALKQNGMPERTLDEVRRFVGNGVKLLMERAVPDGADNPKFEKTFSDFKEYYEAHCNDNTAPYDGIMELLKELKLNGIKLAIVSNKLDPAVKELNQLYFKEYMTSAVGEMEEEGIRKKPAPDMVQKALKELQVSAEDAIYVGDSDVDIATAKNSGLECVSVTWGFRDVEFLKEHGATNLIDEPVELLNYVMSIKFEITKQNNIHFGIAAVAAALVGYFTSASWWVILLFAAVYFGLVNVKLELPVKLSWLWAAILLVIGAILSVFSVQYVLLTDEDFAKTTDMVCEVNVVLALAIYLAILFITNNTRLTCTIASIAILAFGFIDYFVYEFRGNEFTYADLKSAGTGLSVVTKYKFVIDYKFLYVILAAVLYIMLVRRIEVQFESAIHMRIISILLTIICVLYVIMNSMSLNTETWEKKGTYRNGYLLNFVLGIRDSFVKAPDGYSKAAVDKIAGNFKETDSSYSQSDAKNPTIIVIMNESFADLSVVGDFETNTQVTPFMDSLSENTLKGYALSSVYGAKTPNSEWEFETGNSMAFLPDGSVVYQQYINDDPTSIVSNLKNIGYTTVAMHPYYATGWSRNKIYPHLGYDETYFIDDFDQTKILREYITDQELYDKIIDRYEKKSDDEKLYIMGVTMQNHGGYGERYDNFNQEVYKVGASYTDANQYLSLLNESDKALENLITYFKGVDDPVEIVFFGDHQPGLCNDFIKLLNGKGNSGLTEQELENLYKVPFFIWTNYETDAQTVDVTSLNYLSTLTLERANIDLPAYNRFLAELMEKIPAINSRGYYSKKNECFMHVDDATGDEAKWIKAYNILQYNSMFDEKDRSSLLFPYLKMKIVFLDSKTIGDDIDLSEYDKLGEVVKYDFSTTEEAAERTRDADVIVLNKVEVNEKSIGQAKNLKLVCVTATGTNNLDKEYLAKRGIEWRNVAGYSTETVAQHTFALLFYLLEKLRYYDDYVKSEKYVGDTSFTHFSNVFHQISGMTWGIVGLGNIGRRVADIAKAFGCHVVYYSTSGRNSQPGYERVDFDTLLATSDIVSVHAPLTDDTLGLMDKAAFEKMKKSAIFLNLGRGPIVNEADLAQALMDGELAAAGLDVLAQEPMSEDNPLRAIKDSNKLIITPHIAWASVEARTNLMHIIYSQIEDFFANMTSHTQTCITAGIWCVPKKYMNCHKVPLTFGDDKKQTDKTDYPDAFFVADFIYFMSKKAFGTTSKGVEASLYEISNGSGVRVLLTDYGASVVSIFVKDRDGNERDVILGYDNVKSYEKEYCYFGATVGRYANRISDAKVNIDGVEYKLEANDNENSLHSGSNGFSKRFWTVKEQKADEITFEIEDADLEQGFPGNAVVDVTFKVTEENALAIIYNARADKTTTFNMTNHSYFNLNGHASGSVYTHTLQINAEHYTPVKDSKAIPTGEIAPVEGTPFDFTEAKPIGRDIEANDTQLHYGSGYDHNFAIDKTAPGVEKVATAYSPESGIQMEVYTDCVGIQLYTANFIVGQEGKGGVKYNNRDAFCLETQFYPNSINETNFSTPVTKAGDTYHTETDYKFSVRHYRSAIKFLYKKVLKTVWDDDTVPAMKRERNLPAVLSRDEINAIIDATPNLKHKAIIATMYSSGLRVSEVVHLHYDDISRTNMTIHVRETKGRIDRYMGSNILEIVQSVFSVFHRFKCYSKDEKLLYNVRETAAVLGVNVHLVYELINRKLLPALRLGSLKVRKSTLIDFVERYEGMDLSDLDNIKELQQNMNMENNKLDKRTKWSYCIGATGRDMAYALISMFLLTYIQYTMKLTVAQYAVISAIMVVCLLWDAINDPMMGIIIENSHLKAGKFKPWIFIGVILNSLIIICLFTVRPEGWGFVAFFGVGYLLWGMTYTMNDIAYWGMLPSLTSDPGERNWLVTVQGIFICIGQFSVAGLLPDMVAGNAIMAYRTAAIVIAFCFIGFQLLTVFGVKERKRPEKKRTLSLKDMFHIFLRNDQLIVIGIACLLFQIGNGLLIMIGMNFFYFEFGYSVGGSLVFWFTIMYGLGTLISEASFAWLSSKFTRNQIITAATIITVIGYMLFMSVGYILPKSVVLLNIIGFLIFFSQGAFNMTMIVMLNNTIEYDEVRFHERHDSIISAVRSFATKLASAVDQAVVALILIISNIYAISQKISGLEIKAGTGELTSENVIVQADKFIQTADAGQRFILRLGIVAVPVISIGAAYILIKRKYIIDERKYEELVAEIKSTNKKMNIDKICEQLTIDEKIRLLGGVGDWHTYDCNGKIPSIMMTDGPHGIRKLEQEKVGDIETGKPATCFPTASAIACSWNPAIVKKMGEAIAKEAKKEQISIVLGCGINIKRSPLCGRNFEYFSEDPYLTGKLATGYIEGVQSLGIGTSLKHYAVNSQETRRMTSNSQIDERTLREIYLSAFEEVVKKAKPTSVMASYNRINGEFGARNKYLLTDVLRKEWKYQGGVVSDWGAANDIVSCMKNGLTLEMPDPKGFHTDVLKEAYKDGRITDQELDNWTKNVLQNFVSLHKNKEENYEVDMEEQNQVARKLENESAVLLKNNSVLPIGKEKKVIIIGELARQMRFQGGGSSHIQPTKMTNAIEAIREKGYQVTYIQGYQNETEELGEKQLQDTIEKLKQEYRKKDCVILYFIGLTESYEGEGYDRKNLKIPQNQEELLAEIAETVGRDHIAAISFGGAPMDFSFEKNVGAILHMYLGGQAVGESVADLISGEVNPSGKLAETIPFSEKDTPAWRYFAPPNDDVEYRESIFVGYRYYETFHVPVKYPFGYGLSYTSFSYSELNVPEVYSGGKIQIGFKIKNIGKVSGAEIAQLYVCPNESDVIRSHIELKGFQKIYLHPGEEKEVILELDERSFSVYDVEKKAFSMLSGKYQICIGASVHDLQLKANMEVVGNSYFRNERELFSDYFREQPHGMEISAEQFYQLLGGEPKHDKEKKRGEYTVYDSYQDVVNVSMFGKFVRGVVHIGLKIILRGKSERDPAFKMVKMGVEEGNLEGLIATSGGIATPKLIDMLVYNANKKYLQAFKRLLKKMYKMKSDINFSLTHEMLENEENERIHTSYAQEKAILECVSNGDIHALENTYYSLPTTVYGKMTSSNSKLKLLFYASIANTTLVTRYAIEGGLNEETAFSLSDVYIRKMEQCTDVDALMKLNEQMAIEFTLRVAEAKKTPKNYYSPAISRVIDYIYHGKNKTLTLNQLASLVNLTPKYLSALFHKETGQTLTVFIHKVLIEKAQNLLAHSDYSLGEISTYLNFSSQSYFISIFKRYTGITPGQYRKMHRQISWMIKRYYRQNFSRLEDKRIVSGDSMEPEFHSGEIAWVSQQDTLCDGEIGIFGLNNEAYIKKLKRYADRLYLVSLNSKYSPIEIKESDRLDVFRKVVGKINSNDVPDYRFMSDAEVKDLNQISKKDIYHTPSGKYIQFIHDHSEKHLMRGNSYRTEVIGYSRARALLLRHLMNLKKKLHLHYDDISRTNMTIHVRETKGRIDRYTILSQKNLDLLTEYWYKCGRPKDILFPSSWTGGYLDITGVNQFFKKSAKLAGITRHVSSHACRHSFASHLFESGTDIKYIQSLLGHVDPRSTDVYLHVSNKTLLGIRSPFDNPEGGESMSKDCTIQDVFHRFYSSFESTHSISPAQRKAAYHIMNCKTGAFGVNVSVCEDCGCISVHYNSCRDRCCPMCQEFPKEKWVDARREDILDAPYFHVVFTVPEELNPIIYSNQKFLYTALYHAASDTLSELAADSKYLGTDIGYICILHTWGSTMNFHPHIHAIVLGGGLDVKNHWKDNGKDFFLPIKVISKTFRGKYMAELKQLWENDRLEFHGSAAPKEWIPYCKKPFDGAESVIRYLGKYTHRIAISNYRIKDMTESTVTFSAKDYKNQGLWKKKIYSYDTLTEHMWFWFYKMLFCRQRNNLTTTGRALAYIFIIKKTDNGRCIHIFQLGNIFFATKDVSAMAENIENNGCSQRDNAEHEGYVKASRSFNRIWKERDSAQPRLLETILYKDNYNRAYKRVKANKGAPGIDGMTIEEALPYLKEHQQEITDRIYRGKYTPSPVRRVEIPKPDGGVRKLGIPTVIDRTLQQAITQQLVPIYEPLFADGSYGYRPNRSAKDAILKVKEYAEQGYTFAVVLDLSKYFDTLNHEILINLLRKNVKDERVVQLIKRYLKSGVMENGVVIDTEEGSPQGGNLSPLLANVYLNEFDQEFLKRGVPCIRYADDIVLLAKSRRASERLLESSTKYLEKRLKLTVNREKSRTVSVFAIRNFKFLGFALGRNGKGTYVRVHSKSWKKFKSRLKELSSRKRCQSIKPSLEKIKVYARGWLNYYGIASMKSNIDDINGWLYHRIRMCIWKQWKKPRTKYKNLVKLGIPEHYASTIANSRRKYWYISNNKAVIWALNKERLINSGFYDLATAYQSVHVNYMAEENKDAGWLIMNGNRIQIKRRQFEQVIDKLDAIMYKDIFESIRNEAEKRNLRERTIQLYCSDVGYFLRWIGKNVSDLTLEDAESFLTAKRLEGRSPETHVSDLTLEDAESFLTAKRLEGRSPETHNHYRSAIKFLYKKVLKTVWDDDTVPAMPKTKSGTRQVPLSKETIQAFQRVMKKRPKAEPFVIDGRGNFLFVNPKGKPKVAIDYNALFVRMVKKYNKHHMDNPLPHITPHTLRHTFMHILGLPTDIFNVYPASVKFKTYQARWQIGDIYVSGDARKTEDNPQGLGCYLVMTGRGCDDIFRILDSRNYTFGDMFKHCERRYGLDNFHFTRLDIAIDDKNEKPFFTIEQIKKKCEKEEFISNSEGYHFDESKFDDFDTAKTVYIGAGKSGLSYRFYDKDKEVCSKHNKTLNEVGSWKRTEMQLRDDKAHVFAMTFKDRPLELGKLAFGLLANNLRFVVPNRNESNKSRWKTCRFWERFLGAVEVLKLQVPKQQNSLEETQQWLTEGMDFDPRIIGNKVLPNGKKKTGIGQFIRKTSLDEFPQFFNILVGDMSLVGTRPPTLDEWEKYEPHHRARMSFRPGLTGLWQVSGRSNITDFEEVVKLDTQYIREWSVKNDLRIIFKTITGVLKSDGAVMNRRKSKHKEKLNIAMFGQKRIPSREGGVEIVVEELCSRMAAQGHNVTCYNRGGHHVSGSEYDSKRLKELKEYKGIRLKTVPTIEKKGLAAVSSSFFAALCCAFGRYDIVHIHAEGPAFFAWLKKLFGKKVIVTIHGLDWQREKWKSGFGSKFIHQGEKNAVKYADEIIVLSKGVQDYFEKEYGRKTVFIPNGVNRPKIQEAELITEKYSLEKDSYILFLGRLVPEKGIRYLVEAFKNVKTDKKLVIAGGSSDTDSFMNELKDLAKDDDRIIFTGFVQGQILKELYSNAYVYTLPSDLEGMPLSLLEAMSYGNCCLVSNIPECTEVVEDKALVFKKSDVNDLLTKIQKACDHPEMVMKMKNQAADFICEKYNWDEVVKETMKLYRRMIRILHSVSNMDRAGIETMLMNYYRYMDKSKVQFDFLCNKKKPGAYDDEIKSMGGRIYHTPGLNPAKYPVYLKYMRELFQEHPEYKIVEAHNGALGVYALHAAKVSKIPVRIFHAHGASITKDWKLPIKLVCKACLPTNMTHHFSCGVEAAKCYFGQKVVDENDYVLIPNAIDVERFIYNPEIRNKIRKENDLENKHVVGHVGRFMAQKNHTFLVDIFAEVLKIDSQAHLVLLGDGELMDEIKRKAADLGISEHVTFVGNVGNANEWYQAFDCFVLPSIWEGLPVVGVEAQAADLPCVFSSAITREIGLSQHAKFVPLTESVSVWAKTLSDALQQNERNDNTKLITEHHYNIAFEAKKLQERYLQLAGEVKMKIGILTHQYINNYGAFLQAWALREAISELFPEDEVQIIDYVNIKHYIINAGGWFRFYKNRETLKEWFAKIHLPNTFAKARNQEMVLSKRCFNARQINELAFDCIVVGSDEVWNYRDTKGNAELKFGVGLTCKNLIAYAPSVGKTAADEAIPQYVIDGIRKFKRISARDDLTEQLVEQVTGNAPKRVLDPTFLAEFPRAELKAKRKPYILFYYCENLPKNILNQIFYYAKEHGLAVYGAGECDKRYSEVTVNLTPFEWVEMFRNAEFVFTGTFHGAVFSILNRRQFKVYLTNESRIKKVTALLSELQITNRPIKEDFCFDLESMKSEINYEKVYDVIEQNRQSSKQYLKDAIGMAKKMRIGILTHHYVKNYGAFLQMKAMYETLRRLYPKAEIVVVNYVNPRHWRKNIIHILHFRFGIDTPATYIKKIQQLQTFTKYEHTIPRTHSVKSAEEIATLKLDLIVLGSDEIWNLCGSGYHPLKFGTGLEEQQTIAYAPSVGAVTEDTEVPAEVASGLKNIDRISGRDTETVKFIERVSGRNAEKMLDPTFLYNFDADIKKDNIQLKPYKYILIYDCKLTPSMVEELKQYAQNNSLKIIGAGDYKTYYDEGFINLSPYEWVDLFRNAEKIITGTFHGTVFSIKYEKPVVCYPTEKNRINKIHSLLEDMKIPSRLLEIGREKELINMLNKPMNYMQTQEYIARKVQEADEFLVGEKRMSEIILYKDKKECCGCGACMNICPKSAIKMQADEYGFIYPVIQQDLCVQCGACMTVCGYQNKPKTEEPKKVYAAASKNSVLLRKSASGGAFAVIAEAVLKNEGIVYGAALPMENGILEPKHIRVDSLDKLILLQGSKYVQSEIGDTYSQAKRDLIQGKVVLFSGTPCQIAGLKKYLKKEYNNLITIDIICHGVPSKRLFQDFIEFHGKKLGGKITEFYFRDKTKGQGMITRSVYVGEGHGFKEKVLMGGCTAYIHFFSKSYTYRENCYSCPFASEERVGDLTVGDFWGFHEEYPSYDVKQGLSNGKGISCLLVNTDKGNNALEQCEDQFVLMTSDFEKVAKHNDQLYSPSKYSPKREEILKLYKEKGYEAVDQYFHKTCKKDIVKYTISGMVPKGLKRTIKKVMGRIKRMIFLIVFILAAIWAASRGNKKFIIFFMAFYPILPDYFSIELGGGMPLLKASRILLLILLLCVCFRNKKIILIRKPLKATGLYWPLIIYFAARILANGYYVSSLSDAINTEFTVIVEQLILIVLICQIIQDQEDVYLCVKTIVDASGIIAVISIINVLIGSNLFYSLNTVSRNVLMESTVRMGIIRAEATFGHPVYYAMYCALIIPLALYMWQNERRRWNGCILGLNIVAAFLTESRGTIVVLLALLLVFILITDKKTRNKIFCAGCVIACLAVFVSFAVPTVSQQFTNIIKSIIIAFGDSGETIENFGGNSSTGLSSRMIQLSGISWMLIHNAVFGLGASCHTRGKLSYRINGVWQVRDTIDNGYVGYFVEEGLLGGIACFSLFYSLLKSSWKKATFKNSRNMNNSFFLCFVSYVAVMLSVADVSQLLWVIIALYITYNAKAQAIASEMCRCLILLSTYNGEKYLPELLESVLAQKDIYVDILARDDGSTDKTVEILKKYDRVKVYGGNNLKPAKSFLDLIWKADINYDYYALCDQDDVWKEEKIISAVKCIENIDKPALYSSAVEVVDKDLTFIRKSFTDNTFKNPLYDILTYGTPGCTFVFNKALMEKLKQYKPSVISMHDSWISFVCLAVNGFFYSDQNAYIMYRQHDANVLGAQRHSLKDTLRGIIKNKNVLRSDMAKEILKGYSEMMPEKTKEDFIFFAEYKDNLKYKLKILMLPYNKKKTTKRTFEKVKLRIVFNTIMSTSLKKGLMYVLIANFINLGFNLITNFVLPKELSVESYATIKTFQLYVSYAGLFHFGFVDGMYLKYGGKNVQDIRGEDLRTNLSTLRFFEIAVTIICAFVAVVLKQEVLVFFALSILPLNLANYFKQLYQATGEFSLYGKIMNANTILIFFANMMWVYLIKTDNAQCFLFSNVIVYFIVWIALELNCKKLVAGEHRGTSFSLNELVNNIKGGILLTVGNLSSVVLTSMDRWFVKALMTTLAFAQYSFAVSMENFMNVAVTPVTTTLYNYFCKATDKSQIRKTRNYVMVFAAAIVSCAFPARFILEIYLTKYIDSAKVMFLLFAAQIFYIVIKSVYVNLYKAQKKQNIYFIKLTMIIVVGFIFNIVCYGIYKVKESFAVGTLLSAICWYFLCLPDFKWMEYNTKEKLYPFIQTCAFLVCGFCFSAVPGFLIYIFEIAVVSYVSFPREVREFSTKVKIRISGLKRMTEVIKILNNIITNVLTALYRPCGFSLLLSFFSMFFYLYAYRPINVGKGWKAAIIVWHDTFKESALFRKLFLLCFVTSLILFKTLLNRDLWMNPLSNVMGGWSIWETVNGKKKLTTECIENVIMMMPFSATLIWTFGERQRMIWKGIKITFCLSVSIEFLQLFLRLGTFQLSDIFYNTLGGCLGSVIYGVCWKMIGKQQMKGIILAGGSGTRLYPLTKVTSKQLLPIYDKPMIYYPMSVLMNAGIRDILIISTPQDTPRFENLLGDGHQFGVNLTYAVQPSLDGLAQAFIIGADFIGNDSVAMVFGYYVDDPEQFGIVEFDKNGKAISIEEKPEHPKSNYYVTGLYFYDNRVVEFAKNLKPSARGELEITDLNRMYLEDGTLNVELLGQGFTWLDTGTHESLVDATNFVKTVEQHQHRKIACLEEIAYLNGWISKDELMEVYEVMKKNQYGQYLKEVMDGKYQEHLYMIKEETTMKETIDLLGKILTNILTALYEPFGFSLLLSFLAMFFYLYADEPIHAGKGWKNAIVTWYHKFKESVFFRKLFFMAFVTSLILFRTLLNRQLWMNPLSDVMGGWGIWETVNGEQKLTTDCIENVIMMVPFSAVVAWTFGEKIGSGWKKILWQSGKIAFIFSVSIEMLQLLLRLGTFQLSDIFYNTVGGIIGGLMYCAVMKVRKRLMKWLRSLFDKKDEDVIISSEGNISEKNEVYHVNIDNHIDIKKDGVKETMGKNPLLDLKELELRDLSKHQIDALEQWCRRLIDDIFKKNYGNSYIDAEVQPGQPLIKASIKRTIEERIRQDPTRFPRWIDGIVMEDLEYFICRDDLYTSYFKGIFEPFYSVREELRSVLQRLTTIRNKIAHGNAVSVHEAEQALCYSNDIINCCKMYYVSIGKDREYNVPIFTRIKDSLGNDHPRARLEEYPWEEHFYGGPRYDGGIGDRPKPIFHSGESYKVWVEVDGSFNENTYTVSWKYECGEHKINGQGNCVEISFTDDMVSYPLYIQFSLKTTNSWHRMAVKDCDDILKMNYECILPPVSSYMPRTKGSKNKPKVANDYASQIAEKQEFIASLNTEITTITANTDALKADLRGKKASLKEAEKELASLEAKKAKADAKSAEEAKKAEAEAVLKKLLASGMSADEILEKLKMNLSKIHHIAIIVSDYEASKDFYVNKLGFAVIRENYRPERKDWKLELHEMIMGEKRAYKARKPGGGRKKLKPEYDARKNLKEQMDAAVALYDSEMSLQAIGEELGLNPIKVRKLLITAGVYESEVAEKVQATFQEYHETRDYKTSILSTANTLKLSKASVTSYLPYRKGVYFPSTAEKGKISVGAERQRRYRAMKRWRVDPTEENFWGVVVSYAGVGFKTYSGLPFSYEIKKGRNGEYTKELWIDRREKSKSLAWSSIVLAQKNIKGEVVDRPKALGDIRGVTYIYGMFYRFGLIDVPDEVKEKMGHPKTRKKMYICEELMDKINSKDINTFLKGIEISPNDEKYPKNRKRMFEELILEGIIDEETLSSFFYRGIMCGEHRLIRVYKLSERCCNLLRNRSSWDDFMHHYDVSELQYNLILTPLKYKSETAKLVYIKSFKSRLKSRMARIDMIYAFKILKSNKETRAVEELNSYLPVTIDLINHELIIKVCNQSGLLESSRPKKQLDAVFDELKADLKIELNKNKVRPETVLYDMSRELFNNFYRQLPNIKELDEKRNKLCRVVDLLLQDIKLNHSQKEADGMIHIDPNLIDLEDELYKLLQQTVLLDYLETGDLESLLPDDTIYISKIRFSDQDNLEASLTGENGKDCIYDKRTFMGIRNSLDIVKRIVSMRVIFPQKKGNLTVKYDGTDDKFIGVHILDSRHYNQDELNEAWELYRVYERQRINKDMLAKSKGLKSSAIMETASSVISLLKEQGIINEKLHVYCDECSSENVIECDGFYDIQDIRCHECGKQIDLAEANEHGIRRYSIDKASLEELVRNDYYDIYESCKTERKIIEIDHKLQAVEPTKEVIKERDTPDKSVNERLSAIERRNSNEDRIKSIFGFSLWIVVIAVLTVEILDFLIDVLYFKDNHNFIFSTFIKAIKGSVLEPYTGEILGGVIAVIGAIYTLAVRQIKFHWDDIKNMDLNTSSLEHKMVDKLLNEKLEFAIIGLTGKVKAGVSDVCKLLTDESFCDRVTKPADTSQIDMSMTRELIVCYRYLHHNWRPFVEINVTNIIFSFILETEIEVLKNQKCADSTIYDIIDDVLKKKESLINKAYENLKRIEKAIGRDDIFDLRRVDELFKKIFISDNRVEELCSSWLFYKNQIDNDNYFRQQDVIVFCYGCLVSISELFERELRVYGCFTAMYQQYGNNLRGCGKVYISSKDDICPVNLFCIPDRINKFVKMLRHCGSWNLQDTEKKDNKRVNNRVYVVINNLKNLFEAFYFRCRYASFYLLAVTCDERERSRRFKKGFSNEVYELNENLSLGKKIYKRWKKNPEGDFSEDEKIFLNFVKDDVIRTRCYGNGLADFILQDVVKCIEDADLFLKRNYREIDYNSDLELIWALGRMVTLIMHPGLLTPTKEERCMQIAMTAKLNSGCLSRKVGAVITDSEYNILSLGWNDAPCGAESCIRRNLFDLIRNYDRDAYSEYECYNDEFREYLNKINSKITEDRKSNLNGLPFAFCFKDMYQDILAQKDQIYTRALHGEERAIVACKSDKIKGGYLFTTSSPCELCAKKIKEAGIKKIYYIEQYKGISQSHIINIGKERTDYILFSGATGIAYVRLYTPLMPYKDELKAYGYEPADIHKEAKYDVKIIDTKTIKEKVIITDEKLMGQECQEVQEGQEGQVMFSRDDIKKAICEGHLKIFPYDERNITGAGYNLSTMNFAFSIRKHILLKINVETLENGNIHYVNIPPNDTVLFFSKEYIETDNEIAGIFMSKVARVCQGLGNISTTLDPMWKGQLIISVNNPTGKHIRLDLDREHGNIFTLLLFRLETPVTGEHVHDNNKGRCDLLIDHFKRNKGVFFLNKKYLDLKEFVIDEFANSLNGYDNFRNEDIEDCYTERMRKLCYIEDRIKKHVVLFREGRYTVDADIGNYKILYNSEEEKEIKSCKLYNMDKNTNYWLGKEYSLQDIRNQKKELIQLMESYIRIIDYELDIIRHDRRILWQNTEIAKYAKENNRAYTCRKVLDIIVGVIIAIGVACLAHWFSFLVFKKLLSLGLSNKDIYINIFSAGCSLIVGIISGIVLLLIEKKRRMSSHRPYTVLTDPLGGTEGDVARYYNDNATYSYLDRGGNFAYSLRRLSQWIGVADESDVSYAQAGATISGSSIDDKYAYGYDKAHLENAYEINIKQQPDQVKEMIEQNAAKVILMICTTNCTLTTARIDAKSKFNTIFFKNCIDNSGICKIIVVWGITTMNNYEFLEKLGFSSNEAKVYGTLIKHKVLNGYEIAKLSGVARSLVYEVINRLVAKGAVIRIDGEPNFYKPIEYQDLICSIKEENEKNIACAERELQQLATENADVDYVMNIVGEKKYVAKAKKLIDSAQAEISLSIWREPFEVLRSNIENAISRGVKVYIFTFESILVEGATVYSYNINDVSTLFPYRRTTIIIDGGECLVGEEGDRNVYAHTRNHSVVSLATDEIVLNVFWNKLIEKENLLSKGCSGADFLQAIHNLAERYGITDEMTKNFLVYNFQKEKTQNGKKRMAKNVERLQAREAKELIRREKQLGARSNKFYLIYLFMILSLIYITDEIASTISIQFQANIVTEFFVKNMGMEYGAGLSLFSAIGFISYPVTLLIIFYRPLADKFGRKPFLVINTLCMGLGLFLVYLSKDIYVYMIGGTLMGFMVSHDMQCVYILECSDKKSRARNYAIVKAVAILGTLLVPLLRATLMQNVSERWHVVYLVPAIIGFVMSLFALLFARETNAFLTKRIEYLKTPIEEREQRSKEGREQNAQGGILTAVKFAFRHRQLRFLIIACCCFYLASLGTATYSTVMAKSALMTEEEITLALFLYPVGNALFTLISGFVSDKFGRKVTIVAMSCSALTCYLLFIFSGMFKWTPYLTGFAIGGFMGSYWGAGDTIGGIMFSESTPTNLRSSVTVINTLLNGVMGGLATVITMILLPIIPERMFGYMYLGLTVPGLVGAIVIMWLFVGETRGLDLKTVTGTEWDKPKKVKEEQQDGEMNNKQFEIGASEQPLDIIKETCGFAGVFKQIGVIGDSLASGEFESHDENGNIVYTDMYEYSWPAVLERITGTKYNNYSRGGMTAREYVQSWADTNGFWQWNQAYIIALGNNDSFVFGHPLGSVKDVNADCPQDNGDTFFGNMGKIVSKLKTIEPNARIFVVTPQLRGEACDNDIRYIASELAKLCDMFEFTYLLDMTVHAPVYDAEMRKSFGLGFHPNPMGYYAYALIVGNYIDYIIRSNPQEFATIPFVGTLLKNKDYKMKQKNILFTDMDGTILFSDNGKTYFKESDLDAIKEFQQRGNLIVINSGRALPWIVAPLEGYLLPDYMIAGTGSIIADSHQQILHEEPVSFTAIKKIINEYASDIPLTVHTKDNVFSCNQKKQYNLPTTPISSIDLLKTEKLYGMSFHFKDNKSAKAFADWLEKSDHQEVRAFVNIQDVDMACRDCSKGNAMNILCQKLGFMHEQIYAIGDAENDIDMLRATKHGYTFHHSPATVKQYAEGCVKSVSELIDKILKRTNMAVVTSHTYNSDGVMFEYTQSRHRPDYFSFQDNATIQSIMILFATPVYWWGMSAQLKLIIDKCYCRGLQLKNKKVGTIVVGGPPVDSIQYELIDKQFDCMAKYLSWDMLFKKSYYATARDELEKNKDSMNELERIGKNLMHICNQTAHLKVVQIVLVIFCELGGFFMRIYHAKDYADMSRKAANIVSAQVIMKPNCVLGLATGSTPIGLYKQLVEWFKKGDLDFSEVMTVNLDEYKGLSRENDQSYYYFMHQNLFDHVNIPVENTHLPNGMEPDSQKECKRYTELIQSLGGVDLQLLGIGHNGHIGFNEPGESFDKQVHCVNLTESTIEANKRFFASADDVPKQAYTMGIKTIMQSKKILIVASGEDKADIVHKAFFGPITPQVPASVLQLHNDVTLVADEAALSCLMIIKNARVFTEDGSFMQGDVVVKDGRFDSVLERTADTDAANDSAPQEIIDASGLIMIPGLVDIHFHGCKGADMCDGTKEALDVITAYEASIGVTSVCPATMTIQRDELLSVMKNAGDYTYHGGAHLVGINMEGPFISPSKKGAQAAENIMRCDYDYFCELQDAANGLIKLVDIAPEEPGAIDFIDRVRGSAVVSIAHTAADYDTAVEAIEHGASHATHLYNAMPPLHHRNPGVIGAVRDSEKCHAELICDGVHIHPSVIRATFAMFGAKRMILISDSMRATGLEDGEYTLGGQAVTVRGPLATLHDGTIAGSATNLMDCMRFTVRQAGIPLEEAIMCATANPAKEIGIYDEAGSISAGKRADFVLLNDDLDIVSVYIDGKEISCMLGFFKNKSKGKVICSPCNGRVVPITEVPDPTFSEKILGDGVAVIPSEGRFYAPADGEVTAVFDTLHAFTMTTTQGVELLLHIGLDTVTLKGDPFKSHISVGDQVKKGDLLMEADLEQIKAADLNVITPVLIGNTADYSEIKMLKEGNVSAGDEILSLAMKFLQKLGKALMLPVAVLPICGILMGIGYYLCPATMQGGDIEGARNLIGLFLVKAGGALIDNMAILFVIGVGVGMSDKNDGTGGIAALASWLMMTTLLSTGFVTTIMPSIADSATKTLAFDKIQNPFIGILAGIIGSLCYNRFKDTKLPDWLSFFSGKRCVAIIAGVVSILVSVVLLFVWPLLFGALVSIGKAIVGFDVVGAGIYAFLNRLLIPTGLHHALNNVFWFDTIGLGDLKHFWAGETSKDVSWSLGMYMSGFFPCMMFGIPGAALAMVKCAKPAKKKAAIGILASAAICAFICGVTEPFEFAFMFLAPALYVIYALLYGIFTMITVALGFRAGFSFSAGAMDLLFSSSLPAAARTWLIIPLGIAAFIVFYIVFYFAIKKWDLKTPGREDDDVEAEKKAVLTNNDYTAVAKTILEGCGGKDNIASIDNCITRLRLEVKDITQVDDKKIKSAGVAGVMKPGKNSVQVIIGTKVQFVADEFSKLCEMNIWLKLRKTAAIALCELLAIATIFTGCASADLSGTEGAGHATGAVVAGEDSSGALGSKDKVDGPQEDLVNNNSYVSLDAIPAYDGKAYVAVNNNEPFFTDSDMTTTAFENYSDLDSLGRCGVAYANICKDIMPTEERGKIGMIKPSGWHTVKYDVIKDRYLYNRCHLIGYQLAGENANPKNLITGTRYLNVEGMLLFENLVADYVNNTGNHVLYRVTPMFSGSNLVANGVLIEAKSVEDNGGGILFNVYCYNVQPGVGINYENGDSWLDGTTGSTSSGSDSSAAENSAADSSNSETMVHITATGKKYHRAGCRTLKKSDTEVTLDEAKSMGLSPCGICNPPQMALSKKPVNGMKDILPAEMEIRDYVTSVIKDTYRSFGFTPIETPCMENIANLTSKQGGENEKLIFKVMKRGEKLNLETAKEESDVVDFGMRYDLTVPLSRYYSNNANNLPSPFKALQMGSVWRADRPQRGRYRQFTQCDIDILGEPSNLAEIELITATTTTIGRLGFENFEIRINERRILKAMAAYSGFAEEDYDSVFITLDKMDKIGVEGVASELAQDGYPQENIDKYLDLFKLLEQTRDVTEGVNILSEKLGEYLDEEVVTNMTEIATAVNATKGAKFELVFDPTLVRGMSYYTGTIFEISMPELGAACGGGGRYDKMIGKFTGNDVPACGFSIGFERIILLLMESGFKIPESPKKVAYLVEKKYPADKLVDVMNQAKDARANGQQVLVVRMNKNKKFQKEQLMKEGYEEFVEFFNRMAESMQGLHRSHRCTEVSNANIGEKVTVMGWVQKRRNLGSLIFVDLRDRSGILQIVFGEENVGAEGFEKAGTLRSEFVIAVEGTVQKRTAAVNENLKTGDIEVIATSIRVLSEAQTPPFHIEENSKTSEDIRLKYRYLDLRRPDIQRNLMLRSNVLRVMRDFMANEGFLEIETPILCKSTPEGARDYLVPSRIHHGHFYALPQSPQLFKQLLMASGYDRYFQIARCFRDEDLRADRQPEFTQADMELSFVDIDDVIEVNERLLKHLFKEVINVDVEIPFKRMPWQEAMDRFGSDKPDTRFGMELCDVSDVVKDCGFGVFTGALENGGSVRGINVEGQAKMPRKKIDKLVEHAKGCGAKGLAYLCINEDGTYKSSFAKFMTEAELDALVAKMNGKPGDLLLFAADKNKIVWNVLGALRLMLGAELGLIDENKYNFLWVTEFPLLEWSDEENRFMAMHHPFTMPMEEDWDKIDSDPGAVRAKAYDIVLNGTELGGGSVRIHQDDIQEKMFEVLGFTKERAHEQFGFLLDAFSYGVPPHAGLAFGVDRICMHMLHTDNIKEVIAFPKVKDASDLMSEAPGTVDPKQLEELGIAIAAEEDEEMNLKKNIFNAITIILLAALIAGAVLLNNRIKKLETQMSYTSDNTSVILSDVQTMQDDIKSTLEEEASLITDWDISLKSADFTDKTYTVSVSVVPKEYTEDTKTSVFFGTNEIPLELDGIKYTSEATLPLSEDYAGNVTFLFVDGNKRSTEVLDKFEGVTSVFKNVASGILADKPTFDNGSIKLGTDVDVAVMGNDYFDFNSVQLVVASSDTELKTYDIRQLLAENGTDSADSADTDSITSALSRKDDAKKDGSKNDTENDTSDASKEDDGKLHSLEGTVKIEDLIPVTAASNIKIYVKAVSAQGYTFTYDLFEGTVNQDITDFETTADISGGDYTVTDPSGSKYEPMKHTIYSKLLISYLIYGVIAFFIICTFTQHLTTDYIEKQEASNLYREASIIAGDYASEYFGSSMSLSDFQNHMKIVADYMDAEVWVVSPDGELLMDSDDPSIGTDTQNDSSKPVLINGFDVTDFGSDNYMIGNFYGSFKHRMLSVFSPVNVSYQNIGYIVIHKTMSHITAGVNGFMNISFYTVALIFAVAFIMLVTMSRSIYRPITKITKTAKKYAKGDFTAQIDVHSNDEIGYLANTLNYMATELDTLEEDQRKFVSNVSHDFRSPLTSIKGYVEAMLDGTIPVEMQDKYLNIILFETERLNKLTKSLIDLNQFGHHGIHLDIADFDINTMIRTTILTFEGKCSEKGLSFDLLLTGKELFVRGDMVKIQQILYNLIDNAVKFSNNDSSIKIETSIRNEKVFISVKDHGIGIPKDSLSKIWERFYKSDLSRGKDKRGTGLGLSIVKEIVQAHGENINVISTEGVGTEFIFTLPLSKKEGMAVKQKILIVDDDNNIAELISLYLTKECYDTKIVNDGEQALIAFEHYKPNMLLLDLMLPGIDGYQVCREIRAKSDVPIIMLSAKGEVFDKVLGLELGADDYILKPFDSKELVARVKAVLRRFQPAKPEAYASVDIKCVEYPGLIVNLSNYSVTYDGQQIDMPPKELELLYFLASSPNQVFTREQLLDNIWGYEYVGDTRTVDVHVKRLREKIKDKPTWRIATVWGIGYKFEVKMNKKVYKTLEYNKILTMLSSYAACDETKKRCLSLEPITDLYEIRHLQTTTADALSRLYKDSGVSFVGIHNVHASLKRLDIGGALNTTELLRICSLLEVAKRVKAYGRSAMDNEKQDSLSGLFAGIEPVSALCDEIKRCILSEEEIADDASPELFKIRKSIRGMNDRIHAQLTKLMNNSTTRTYLQDAVVTMRDGRYCLPVKAEAKGNVPGMMHDQSSTGSTLFIEPMAVVNLNNELKELFIKEQEEIEKILAALSDKVAMNAAALEQDYEILSELDFIFAKANLAKSYNGVAPEFNTEGHINIRKGRHPLLDAKKVVPIDVRLGEEYKQLIITGPNTGGKTVSLKTVGLLTLMGQAGLHIPAADRSKLAIFEDVFADIGDEQSIEQSLSTFSSHMTNIVKILEKADDRSLCLFDELCSGTDPTEGAALAISILNRLHQYGAITMATTHYSELKVYALSTDGVENACCEFNVETLSPTYRLLIGIPGKSNAFAISSKLGLDENIIEDAKSRINDNDLDFEDLIASLESQRQTIEKEQLEINSYKAEIEKLKKQLEEKNERIDKSKDKILREANEEAYKILQDAKELADKTIRNFNKYGQGQAPMSQMEKERSALRDKMNDKEKKLSDIKKNTAKANHKAPKKLRIGDSVLVLSLNLKGTVHTLPNAKGDLYVQMGILRSLVNINDLVLLNDDVSPAKKYGGSGSKIKMSKSLSVSSEINLIGKTTDEALALLDKYLDDAYIAHLTSVRIVHGKGTGALRKAVHGLLKRTKTIAEYHLGEFGEGDAGVTIATFKMEQFIREKIKDKPLNKKRLAKKAGTAALCGVAFAVAASIVFAIFLPVINRQSKKASDGKNNNDVQIATQQPGIDDSNDAYSENGTQSTESGTSSEPSLQTYQPTLADYQAVQNQLYSVGASASKFVVGVTGVTDATDIFNNSYETEGQGVGVILRDNGKQLIILTEKNVVDKADKLSVTFVNDMMADAALVKYDSNTGIAIISVDKSLLDDTTTGAIAVAELGNSNIVSRGASVIALEANYAILTGLVTSTTNELSAQDNNYSVLTTDIASNKLQSGILINTDGQVIGLSLQDFNPAEENNTLTAVSISDLSPVIEKLESGADVPYIGITCTTVTEKIANRYNIPKGVYIKQVTMDSPAFVSGLQSGDVIVAVNNTDVSNVSAYNTQLMKQKPEDTCNLKVKRKGSNGYTEITCQVKIGVMNMKYISTLREGERINEIFLCKSKQTAMTKSGKPYDNVILQDKTGTLDAKIWDVGSVGIEEFDAMDYIAITGDITSFQGNLQCSIKRARKVNEGEYDPADYLPVSDKDVEVMYKELMGFIGSVKNQYLSQLLHSFFDNKEFERRFKFHSAAKSVHHGFVGGLLEHTLGVTKNCDYFAKMYPVLNRDLLLTAAIFHDIGKLKELSTFPENDYTDAGQLLGHIMIGAEWVGDAIKSIDGFPVVLANELKHCILAHHGELEFGSPKKPALVEALALSFADNIDAKMETFRELLVNVPENDTKWQGYNRFMETNFRRTSVMKKNDIFELEITDMGTDGEGIGHYDGMTFFVKDALIGDVITARATKLKKNYGYARVEEIKTPSTFRVEPQCELHKRCGGCQIQALSYEKQLEFKNNKVRNNLMRIGGFSEAKLDSKMQPPVGADNPYRYRNKAQFPVGYDRDGNIVTGFYASRSHNIIPVEDCRLGVPQNKEILDIIKEWMNECGITPYDENTHKGLVRHVLIRYGFTSKQIMVCLVINGDSLEAKRRAGNATDILCERLSKIDGMTSISYNINKENTNVILGKKTVCIWGRPYIEDTIHLLSYPDFTPQGTGITYQISPQSFYQVNPKQTEKLYSTALAFAGLTGNENVWDLYCGIGTISLFLSQKAKQVYGVEIVPQAIEDAKNNAKLNGITNAQFFVGKAEEVLPQFYENAKKTEKITDDTKTTGRTDMLRPDVIVVDPPRKGCDEKCLDTMLAMSPERIVYVSCDSATLARDLKILCEEKYELIKWQAFDQFSHTTHVETVCLLSRKAQMAKGYFFAKVVSRHEDEKMSNDFENSQEYRKALEIAKKQEEVYKNVTKAISPEALAKFQELSNKLSEWKNSLNNMPGLLKFAEMLKNYQQEVRVTEGLTEAEFEEKYRSEIEWSEKFGKNGWVISEHSNLADIKNWEQLLREGEAKVAEFFDGEDIVILDVIIEGLQEKYVSDEIQLYFKNGMQAFENEDYMTAAMYLLALLDNRVNKLVDFPNQHMSYKVKYSNSGFANQMAEDFRQLTEKRGFMSKKIYFLEMYPSLIAYLNRIFIDGSYKFEKGIEPPYLNRNWLMHGRMNRSIERYECIQILNALSVIEFMFGDRMNKRDDFSQKTIDTLCERVGGKCSNPNCRRETKGPHSNPQKRVSIGEAAHITAAAEGGPRYNPDLTPEERSSIENGIWLCRSCARLIDSDERVYSIELLRMWKYAAEYEQSCIINQTDNWLKTNVVFENRKNIACRKAKEALDNLHGILQYAYEYWKHNFENRHYGSFLENELMEHWVLYEDDLRRIYTFQEKRVLLNEVLLEYSLDLGPEICKEINNYCNYLNFSYQSDTCGLYDNYWRCFFEMLSTCFDILVGIKNNVDDILYRQYSVLKMAEYMGEYKIIRRMDGGGNANVFVAENARGEEVAIKILREESGNGKKAVKRNRKKRIRFKIETEMVVGIQDEIKGVIPIFSYGLPDEKTKKYWYAMPIAIPLEDKLKEVKSLEDKVNCVLELARTLEALHKKDIVHRDIKPKNIYFYNGKYCLGDFGLVDYPEKRDLTSLQEAVGPKATMAPEMRYNAKNADGKKADVYSLAKTLWIVLTGVDHGFEGRYEEDDAIIGLRNDKRYKKEHLVELEELLKQATEYDPSLRPSMETFVTTLEKWLEVVSNFQKSNYSEWKYLQNRLFPKTVPLHAEWRDIDSIIKILNDIGSMSGLNHMFLPTGGGQDVESAKYANEEGCICLVAGGCNYIFKPYRLELENYGKRDYRWSYFRLQLEPIEPISNAIYEDCRESLIEDFPGHYIESNLASYGRYDDGTEFPKGHRQVDRFLNGSFVIFSKQSVYNHISGTYDARHNKMSSLEFRHYIGTMRQSYYMMKDFTKFSSIYQKNPFSIKEEKEDVETHRRIEESCKFDKFIEENWNKWCLKDICDENNNKNDGKLEFAIMFHINGGTFGARKYVAETGYICEEDVIPYPVSKDGKYLFTDFNGAVKAIVEMKDYIKKLCIESGIVWQEMGIYFTIKLFRIKPPSHIFTEEEIKEVLRAGNDFRNNRLVIDEEGYAQLIDSDLHYECYRYPVSQESYDARNNYVGQYANLDDVGEIYLAMLDGWLHHLRTGQRYDVDYYDQCEDAEKMLAEIKQYYQMRKADGTYISVLDHGRIVDSVRNGRVFYVMIMELNALQRHYGDCLELVEKMIIKNGIVADPASGLYEQMDILVKDGKIVKIAPDISCASDAAATEKEEIIDASGMIVGPGLIDTHVHFRDPGFTYKEDIHTGSMAAAKGGFTTVVCMANTKPTVDNVDTLKDNLTRGKQEKIRMYQAAAISHSLKGQDEVDMAALKEAGACGFTDDGIPLTNAAFCYRAMQNAAKLDMPISLHEEDPAFIKNNGINHGKVSDALGIYGSPSIAEEALVARDCLLALRSGADVVIQHISSGVSVDIVRTYKKLGARLHAEATPHHFTLTEDAVLEHGTLAKMNPPLRTEADRQKIIDGLIDGTIDLIATDHAPHSTEEKSKPVTEAPSGIIGLETSLALGITSLVKPGHLSMLELLEKMTINPARLYHMPYGTISEGAAADFVIFDPDEKWVPCEYASKSSNTPFTGMELTGKVKYTVCGGNVIYSDKMSLIKGIHHVSMKCSSTEEYEKTIDFYKNILGIPVTREWQAGIMLDTGNGIVEIFNDGDDAPGKGVIRHFAFATDDVDACVEAVKAAGYEVFIEPKDIEIASTPVFPARIAFCKGPLGEEIELFQEKMVLQGYYAMGKTPIKHTLAGYIIKKTDTEGYRSGKLTGEKHLNKITEMMEFVGGRRKLIDQARFIENNTQAGRDGKIRINWIQVNSDIKKIDCDVSSIPEMCRLEGVEDSRAKQLRLIESVKQWKSEVGDCDWICRYYDDILGRLEAGKSVTEADEDMRFKCINSITRIKEPVWERVFSAKVFNDSKKFEKCYRQKMVSILTKYSPYYEKDMEDYDTEGEEDDAKEDNKKSGLEILKMHGIMSYAQTMEWKGPLSYRIDDTCVIDTSKQIYGTIINTQTLEHASPVSLAGCKRIMTIENKANYESMQYDENTLYIFCHGYFTPKEVYFLKKLSLIVSKECEFLHWGDMDFGGISIFLFIKDRIFEKLMPYRMGVADFEKALKKDAGIPLKASTREKLQKKDAGLLAELKEAILESDKTIEQERLLMNPFKMRPERTGDLFVDWEKFWVKPYNKNEVNPYTRTRIILMNGTEFENVWFSHQFSRSVGDDELRRKLAYIRKSEQQQQKILTHLKPADESALEHTIGYEQLAVDLTAHLAKRVNDKNIKSALDFALLEDFDHLYRYADYLDFTTGEHAEKLVGGYTEITPGRPTISHHRHPYDSIRYPMTDKCPATMDVLAANVITAAEQQTMNYYMNTAALWPDEMGRRLYQEIGMVEEQHVTQYGSLLKPCMSRLENLLVHQYVECWLYWSCYETETDTRIRGIWQFMFEQELKHLHIALELLRQYEKKDWQEVIPDAEFPAPLVLESNIEYVRCVLGSTVNDTACRERYVDVRTNAPETFIRYQRMVNDPVRNVMSHTFIEDYIRKNGEDYRFEVAPNPVPELRDRTKDNICVGRQPLCRNRYMITSTILGLLIPFIGTSLGAACVLFMKNELSVKTTKMLSGFAAGVMIAASVWSLLIPALEQSQSLGKMQFVPAVAGFMLGMFFLLILDTITPHMHLDNSVEGPKSNLSRQTMMVLAVTLHNIPEGMAVGVLYASWISGTTTITRAAALSLAIGIAIQNFPEGAIISMPLHSTGSSKLRAFVYGVLSGIVEPIAGILTILAIGIIEPVMPYLLSFAAGAMIYVVIEELVPEMSEGGHSNRATIAFMVGFCLMMTLDVMLGMDALVDGLLEELNCDVVFKIPIFGGIPIYESVVVTWIIMAAVFLLCFFLGRNLSVENPGRRQVAVEAGVKFLNDFFSETLGEKGKDYIPYLATVIIYIGIANLIGLLGFKPPTKDMNVTAALAVMSIVLIEVAGIRAKGTKRWLKSFAEPMPVILPINILEIFIKPLSLCMRLFGNVLGSFVIMELLKMVVPAIVPAVFSCYFDIFDGLIQAYVFVFLTGLFIKEATEMSSTLLVAIGAGIAVLTGIGAGLGIGKATSSAVDAIARQPEAESKISKSLLLGCALAEATAIYGFVIALLIILFLKMLKIDPWNIIWTVVNLLFLYWIFKKFLFDRVMGVINQRDEMIQKQFSEAKKSQDDAESLKSDYKKKLESAKTQADQIILDARERAEAEQEKALERTRQEADSMLEKAKADIASEQEKATKAAEAEIAKLAILAARKIVKTGEANDTGSSKMTQAAVNNAIVLYRLAVERRDVEEAQRVYFVTEKLAQTLANPLIPLTKKYDIIEKVYGFESEPKLITSFIKEMVKLGYAAEMNEIFEAYYRYWDEKNHIIRAELISAEAATDEEANDAKALLQSKYPEYEISLTQKVDETLLGGYVIKTLNTEYDRSYEGKLRELERKLTRRMGAISATDIISIIQSEIENFDFDTESRETGEVIYVGDGIATIYGIDHAMYGEIVVFDNGVKGMVQDIRQNEIGVILFGRDHGIHEGTKVVRTKKKAGIPVGKGFIGRIINALGEPIDGKGDIKEEDYRPIENEAPGIVDRKSVDTPLETGILSIDSMFPIGRGQRELIIGDRQTGKTSIATDTIINQKGKDVICIYVAIGQKASTVAKIVSTLTKHGAMDYSIVLSSTASDPASLQYIAPYAGTAMAEHFMHQGKDVLIVYDDLSKHAVAYRALSLLLERSPGREAYPGDVFYLHSRLLERSSRLSDELGGGSITALPIIETQAGDVSAYIPTNVISITDGQIFLESNLFNAGMRPAVNVGLSVSRVGGAAQTKAMKKASGSIRIDLAQYREMEVFTQFASDLDDATKAQLAHGKALMELLKQPLCHPLSLHEQVMTLIMANHGVFDTIETKDVKKYQGDILSYMDLSYPEIGQKIEENRAIDEELVNKIMDAVKEYKGMANTKEIQDRIKSINDTLKITNAMYMISSSKLKKSKKMLADTEPYFFTLQSEMSRILRHLPDMEDIYFKTNEDKLPEDRKVGYIVITADKGLAGSYNHNILKMAEEHLKNHPNHSLFVLGELGRHYFEQRGIEIEKQFHYTVQNPTLNRARNIAEEILELYLHNELDEVYIIYTSMINAIQEETQMSQLLPLKKADFTVQIPIDIPREELALKPSPEAVMDRIVPNYVVGFVYGALVESFSCEQNARMMAMQSASNSARDMLAELDILYNRARQAAITQEITEVIAGAKSQKKKRKMKTGKIIQVMGPVVDVEFEDENLPAIRDALEVLNGDKKSVMEVAQHIGNNTVRCIMLASSEGLHRDMEVTATGAGIKTPVGEQTLGRLFNVLGEAIDGGAQPDTEEKWEIHREPPIFEEQNPAEEILETGIKVIDLLAPYAKGGKIGLFGGAGVGKTVLIQELISNIATEHGGYSIFTGVGERSREGNDLWTEMKESGVLEKTALVFGQMNEPPGARMRVAETGLTMAEYFRDEKHQNVLLFIDNIFRFTQAGSEVSALLGRMPSAVGYQPTLATEMGELQERIASTKKGSVTSVQAVYVPADDLTDPAPATTFAHLDATTVLSRKIVEQGIYPAVDPLESTSRILEPDIVGEEHYQVARKVQEILQKYKELQDIIAILGMEELADEDKVLVYRARKIQKFLSQPFHVAENFTGIQGVYVPVEETIKGFKAIIDGEMDEYPENAFFNVGTIEDVKEKAKTMQQMATNTFYLKVIAANRVFYSGRCRSIIVPEFDGQKEILAHHEDMVIAVDEGEMRFQPEDSDNWEYAVVGMGFVEIVNNRVTLLVETAEHPEEIDIARAREAKERAEEQLRQKQSIQEYYHSRASLARAMTRLKATSGKMTEKEKIRIQTSETFLLSAILALSGGFQDAYTYNVRNKVFSNAQTGNVVLMSQHLMVGEWMKGLSYLFPILSFALGVLVAERIGHRYKKAKRIHWRQIVVAIEIIILFVVGFIPHRYDMIATMLVSFSCSMQVQSFRKVNGYGYASTMCIGNLRSGTESLSIYLRDRNIGALKKTAHYYGIILIFAIGAGIGGVCSLHIGIRAIWASSVLLAIVCTMMVREHRMKLLKQFLIILAISFVGEILKYLLPLPVPASIYGMVILFIGLLTGLIPLNSVRSAGKFMIEIMPVMFIPAGVGLMSSWGNLKPVLVPVLVITVVALLTVMIATGYVSQLVIRMQKRKRADAGENKMDNLFQTSLFAGVTVSLVAYLIGMLLKKKFKLAILNPLLISIVLTIIVLVVADVDYDTYNKGASYLSWFLTPATVCLAIPLYEQWTLLKKNIAAVALGLTAGVITSLVTVLVLSVLMGLSHEDYVTLLPKSITTAIGMGVSEELGGYVTITVAVIVVTGVLGNILGEFVCKIFRITEPISKGLALGASSHAIGTAKAIEMGEIEGAMSSLAIAVAGILTVVFASVFANFYMIITIARKCGCDADTIGRAVAEKYHLHFMDREAIAAGAKEAGCYDEYEEFYSERPVNPLLYSIVMETEEDNVLHDTPGRALTFIDRLPLEDGCEGYVIQGRCANFAFQGRDDVVSVFLTANDAFCVDTVADTHGVSARKAKTVVRETNDNRKTYHKYYTGQEWGQAENYDLCLNVEKLGVDGVIAMIDSFIQNRKMYPTSGTIKIDGKVLGRDMAFPQKIGLFIENILDMRDKGCLILLSSHIELWSKDWMNEKRASIRFIERCYKLYEQKMFHVAYCILRDEGLAEDAVQEAFLKLMKSNVDFKDAKSDECKQYIITIIKHASIDIYNRKKREQELIFFSDENSDFDRSKPEALDEQQQQIREVMDKLPAKYYSVVNCMVVKELSVKETANELSISEDNVRKRFERAKLLLKTIMKGCGGYEESRAVMKNQELYDISIEEFDKMNEKHVFSEKYKKNKQKMLKDYRKSVWSSTGAKTAKVAVACAAVLIASPVVANAASNGELFSRIWGKAGHKDVAAHEETIYLGEDEGTFTASYPERTYEDVNPQKAESLIGDSMSYPNITKEIDGTTITILSVVRDNNSAVIEYTLEKAGGVDALNYSQLDNEAKGAWISEESTFNFSIGNGSTIVDLENSTDEKLYCYEYITLDDDQNYVEMKIEEYPCKLKEIYALDYKDPKREELENQVVSSSTKIPFSSNVVAETTFVNPAGGKIKVSPLSLKVDMSKGFGLSEVQAADPVNCYYVAINYKDGTNYVVMESNADGRHSCDVEKDNTAYSCGTLTGEYVMLFNRLVDTDQISSITVNDVEYTLEMNKKEFEQFVEESGKDILRYCRMIAYSNEAGNELYQDTMLKLLEKQESLDCEQNIKSYAISISILLLKNKKRKYAVRNKKAVFVSLNDLADEDGKQIRNENILTPEEQYMKKDETYLVKQLVYELPEKYKIPLYMNYSANMSAEDIAKTLDIPLGTVKTRIRKAKKMLKERLEAIGYDRMTDEKLEKILQQTLIPKVADEDIYLYRKVRKSRKKFVKIFAAVAACLALILGINASGTFTIGTDKDTDQTVAENSPFVITCYAKELEKGVSVPLKFAGYDENGYVINRGEDGESVAYNTGIRFKCEGDNIATVTYSIKGAAFWICEKHGNSIITDCTEYTGKYFNAGGFAPEGCKEDETDEENYDIRELSSYTLAYDKQESDTSIFAIKGMKKNKNIYELFESDFVDDNVEGITKLTDDVVITCTVTYNDGTSESKEIGLKGIKKTIKNDGEQSCEVADFACELKMNKKTLIKVCAVTCGLSLTLAGCTSSNNSNDINNTENYNTEINSQDTEKTGSKEIINKKIDENLYIDATLQMPETQLNEYNTKLKDFNLKDIMTYLYPDIEETELVTDESGGIGYGAAYIGGESGSVSYSKDDDTSYLQLLCGYADEKKLAETKALQFESITDARAKVKELTDKMGIPGELGKENITAFNSADLNNIQSNMEQDSDYKDLLSAKKQQSSTIGIDTEIYCFTYGIKIDGLQVYANDDPILQQTRDVLIAQPVNIEVMISNRGIESVFVSGIMDEPDVCNANVDIIGEKEITEALNKKFGDVILTDEYKVTNIWMEYFPLLQNDSFTDIKLIPVWCLDFEVNGNGAEDGGYTIRINAITGDEIAMNKVIRAEFGRTINAGLIIAIAGIIFSICFDSFNDLIAGLRNGQGYVGYFFSNAAFGGMCTHYMLPVFTALPFSVSLCQERNNKAVSYIVSREGKNRYIFAKFIVSAISGGFVAACGTVLLFLMLAMRFPIAGDEFEGAVVSDYFHEWSAVYYPQLYILTLSILAFCRGVIWSSLALCVSLYTSDFMVVLLSPFLGSYVLVRIFQIIRVPDMVRPDMILIGQVVIKSSGLTLLIAIAISLTIVTLIGAFFVGKMKEGLKSGTIYMELFIKANWVSRYNLRMLYENIRIPIAIFVAMIYVMESLTDIASFSSIVNVKVTPYAFVFVINNYRVQFIIAACAIIIFGNAPYENETYRYMVSRSGKTAWGLGQVIYIIKMTLIYVAGIFAASIIPYITRIDFSGEWGKIWGTLGKTNAGTQYGIQLAVSPNIIANYTPLLALVISVILEFCSVLWLGLVIYWGNKITGKGVGTVIGIILSVLDVCIANDWMGYAYKFSPMSLSQLALYYGYAAKWGLNLGYTFRFFSITLIGLGTLCIVANNKGKLVKRLKNGKMENKSLIKLNDVTVKFKEHLVLDKVCMEFESGKIYGIIGRNGSGKTVLLKCVCGLMDTTDGTVSVNGKIVGKDVDFPENIGFIIENPGFLPHYSGFKNLKYLASIRGTITDDDIRRCIRTVGLDPDDKKSVKHYSLGMKQRLGLAQAMMENPDILILDEPMNALDSIGVSDIREILLDLKEQGKLVILASHIHEDIEILCDEVMKIEDGKVSKMMDRTLKLPVGIDNFEKIRKSGFYYIDKTRLIEQLLQNWGEVNLFTRPRRFGKTLNMSMFKSFFEIGTDKSIFDGLYISQNTALCNEYMGKYPVVFISFKDVNGLTFDRAYDALVQIIGEIANGFSFLMNSDKLSKNEKEQYQGIIQIKDGKYHMSDGVVISSLKVLSQLLTKHYGKNTIFIIDEYDVPLDKAFQHGYYDEMVELIRGILGKVLKTNDYLQFAILTGCLRISKESIFTGINNFKVLSILDARFDEQFGFSDDEVKNLLADYGLASHFEEAKEWYDGYHFGNVDVYCPWDVINYVDNLVANPTARPQTYWINSSGNSLVRRLINIADSTTKDEVERLIAGESIEKVVHLELTYNEIDKNIDNIWSVLFTTGYLTKVGEVKLPDSENYALKLVIPNKEVREVFILQIQEWFKEVVAKDNDEIRVLSKAILEADTEKIQRQLNIIMDRMISILDTKARDRQKENFYHGLLLGLLRGSNPNWLIKSNRESGDGFSDIIIKPEDPDSGIIIEVKYATSFQGLDKSCEDAMNQINTRRYDAVLREEGRCNIIKYGIAFHKKRCKVVSDKMKRKKITAIMAVIMMAAGLSACSHSNARLEGKSGIVKDEASKKEGDTGVVDQAPATYVLDAEYVNKDDIVSVDDTIEINGITYKIEKYEHTTEFGNRNKDTVLDYLKDLYGEAIDDNYNLSNGNSYIFITLTIVYKDGDDKQIEGNRNVGVLYAIKDDMERIQENSDCVYIDNYWLGGDESDVYHYVLGKGECITSELGYIIQDEGIPEDSKYIYYCIEGIDSKTNDKVQKYFKLELMNRIFKLEIKRAFRNRLFAATLCVAFAICVWHFMENVWIWRMYVYYDTYPLSAYEKWIGADNASVQPLLLYLIMPALCAIPYGRSFYFDVKSGYAAQIISRGKKSDYIRAKYGAAFVSGALIGMIPLVFDFMLTAMVFPMVIPQVGTGTFPVAAMDIMSGVFYTHPLVYNLIFVLIDGCFWGLLNCAVLWAVNFVRSRFWILLTPFIIYIFVFCMVHFVNRVSLSPVMFLRPSAPFRNDIRVVICAFIILIVVNIIFYIHAVKKELVAYEMNRRIFANLILYDIRKGFRENKIKWIVGVFIFVFFSFITVSDFSVNSPELGFLAYFTNILQGMPPYIKTDDSVFTIPVSWFLFYAFLFFMVGFYPLSDLYGAGKKTLILSGSRFKWLWSKYIWTLINVIMYYAAMILVLAAVTCAIGKWSTKPDDMLMEMGIDMQRFSTGNEVIVWLILPMLCACTIAVVQLTISIFAGAIAGYIVSIVYLVVSVYWVSPFLMGNYLMIIRNNRLCAGGMDAAAGIISCIIVMVVSIVSGSVYFNRKNILMKIEIEHVSKKIKDALVLDDVCMTLESGNIYGFKGVNGSGKTMLMRAVSGLMYPTSGTISIDGKVLGKNMAFPERIGMLIENPAFIDSYTGYDNLKMLASINKGEVDISRALETVGLNPHDKRKYRKYSLGMKQRLGIACAIMEEPKLLLLDEPFNALDKEGQEKLSEIIRDMRDKGSLILLSSHDKDELENLSDVIYLVDSGRFKLKMKQRKSKQVRLFSGMLIGIVMIAVLARIVYLNHCYPSPKVITYTDNDTIKLGNYEIKQTGWEWGDGSLLKEKCPDYAYDQTDDGSEYPFDSVRVGFITLSVTKVKDDTTSLDLTSLAFEMGTNGDQYDMELFFALNPTLEALEIKLNAGEETSFVIPYAMNEDLVSKKDWSRVDKMKLYMVLQYYPQKIRLCCNMSACADSKMADTQQKNTADKSDTQQGIDIAAYEKKLADNRENYKLGCEQYSTDTDMIVQDCQRIQKTQGNSTFLGSFLFVKIMLTEMHIKSKKQKKRFLHAYMKELEYYDSLNTEFKTKRKIIVNTDRRKKVRYIDENNNITGITKWVWYYEIFYKPCDFIRSKQINDFYRRKCEEGMRLPNGFGSVYKLSGNRRKPWVARKTTGWTFDEEKQKSYPIYAFVGYYESRKEALTALADYNKDPYDLHHNTITFAEVFEKWSEVHFPKVSESNCKGYNASFRSCEKLHNMKFVEIKLDHLQQAVDESGKNTPTLKKMKIMFGLMYDYAVMHEIVTADKRDMVRYVDISKAGNPNAYNRKPFSKKQVDMVWKVKDSNIYYSVILMLIYTGVRIGELLDLKKEDVHLDERWFYVRESKTESGIREVPIAEKVVPFFQYWLDRDCEYLICTPDDKHFLYRNYYDSYWTPLMEELKLQHRPHDTRHTCVSLLTEAGVDERIIKKIVGHKGQGVTETVYTHIELPFKLEAINKIMLNLFKKKKKEPNHDMLNHLDENGELPWGWIYANKDFLNKIENEYSYFLNSWCNALGKSPKELRPALKSFIIYLKDCEKLCEEKGECFDFWFHNILTTNDYISKRCDELNELESNFNNLQKDYENKQNHILELQRKIQEMKPTVVQALIENDNILQSEFWKLFNTEDQDAVKEIVYSLRKEGKIKRTKSGRSFIIHYIQMEFIDRINQLCKERKISKRQLEREAGLGAGSSSKWKTFTPNNTTMTKLANYFGVSISYLTGESEYKSEQEAMWDAQYNSEALSDESTRIEKGCRIPVLGQVVAGIPIEAIEEVLDWEEIPFRLAQTGEFFGLQVKGDSMSPRMQAGDVLIVKQQSDAESGDIVIAQVNGDSACVKKLLKQDDGIVLQSFNPTYAPMYFSNKDIIEKPVQIIGRVIENRQKFMMSEFEKQVRHALIDRDMTMTDLANELGITISYVSDLLKGKRTNQEQLQRIKEFLEITDTDDYEEMEGYKVFEPDWTCRGFQYEVGKTFEEDVTPFCCNRGFHFCKELKDCFNYYPFNPDNKVAKVIALGEIDEESDDSKCCTNKIQIVEEISWEDVLRMVNLGKGNAGLCNSGNRNSGNRNSGDWNSGNRNSGNRNSGNRNSGDWNSGNRNSGNRNSGDWNSGDRNMERKKRVVPREVCAVCLERGNHCIPKTKSGTRQVPLSKETIQAFQRVMKKRPKTDPFVIDGRGNFLFVNPKGKPKVAIDYSTLFVRMVKKYNKHHMDNPLPHITPHTLRHTFMVKKYNKHHMDNPLPHITPHTLRHTFCTRLASKNMNPKDLQYIMGHSNISITMNWYAHASIDTAKSEVQRLIAMHDYNTILGVIGLRLSKVSYDSVQKRYRIGRSGIALIMNRYKDSGLSLDDLRQMPASKVVDLIYPKENLRHKDIPLPDFEKIHEQMIQMGKHADLSFLWIDYKKEHPNGYQLAQFYKLYRDFMVDTYGTSKTSMPVERIPGEKMYIDWVGDQPELLLDTTTDELRKVHIFTTTLGFSSLVYAEIFPDEKLPHFITGTVHALSYYGAVPKYLVPDNLRTAVTRHSKDELVLQSAFSDLETFYDTIILPPPPRKPKGKPTVENHVRFLETHLVEELKKDTYTSLEALNAAVKKIVADINQRPFQKKSDIRKSRMNGFEKYDKPRMNQLPGESYTLCDYKYFLKVPDNYHLEYDAHYYSVLYTYKGKPAILKATMTEIRICDEYNRLICRHPRSYRDFPLYITDDSHMPPEHLYYKEVNAHDGAYYRRWASVYGESMVTLIDRILRSSKHEEQAYNSCAGVLHSCKDVPHRLVQEAAEKCVEANACKYSYFKKVLSMVQNNHSSSAINGTGKLPSHTNIRGKEAYKMSSSHDITLTPQEQALIMRLKSFRVPEMAHILEEQLKDPNADLNTFMERITAMVDAEWQARAEKRFNRLMKEAHLRYPAADLDETIYRPERQLDTQTIERLSTCHWIEEGKNLIVTGSSASGKTYLINAFCVTAMKQSKSVKYIKANTLMSEMEQARIKSTNLDYLNKLTKLDLLVIDDFGLMDLDLDKCRDLFEVLDTRDGRKSTVVISQFPVSTWFDMFADNTYADACLTRITDKHHTYRLEMNGINMRETENYRIKDMTESTVTFSAKDYKNQGLWKEITISGEEFIRRFLMHVPPKRFVRIRHYGLLSSRNKKNYRIKDMTESTVTFSAKDYKNQGLWKEITISGEEFIHRFLMHVPPKRFVRIRHYGLLSSRNKKSTAFYLGKEKLRHSLGRPSRSDFVQFEFVKEIYNMKKVCLAVLPALTIVLELLPLGAVCIFATSPTERVKETFSYFSLTPFMAEENKDAGWLIMNGNRIQIKRRQFEKVIDKLDAIMKSLNTAFSFAPPSILSLTIMKSIGGVKDENGVSSKPSEEVKAEPEKIDFSNVKIEPLFEEEVDFDTFSKSDFRAVKVKECVAVPKSKKLLQFTLDDGTGTDRTILSGIHAYYEPEELVGKTLIAITNLPPRKMMGIESCGMLLSAVNNLKDSEDEELHLLMVDHLHYDDISRTNMTIHVRETKGRIDRYTILSQKNLDLLTEYWFKCGRPKDILFPIVSGDSMEPEFHSGEIAWVSQQDTLCDGEIGIFGLNNEAYIKKLKRYADRLYLVSLNSKYSPIEIKESDRLDVF

(The sequence listing continues in the following parts.)
